(19) United States
(12) Patent Application Publication
(10) Pub. No.: US 2024/0384332 A1
(43) Pub. Date: Nov. 21, 2024

(54) PROGRAMMABLE NUCLEASE DIAGNOSTIC DEVICE

(71) Applicant: Mammoth Biosciences, Inc., Brisbane, CA (US)

(72) Inventors: Jesus CHING, Saratoga, CA (US); James Paul BROUGHTON, South San Francisco, CA (US); Janice Sha CHEN, San Francisco, CA (US); Clare Louise FASCHING, Redwood City, CA (US); Phillip You Fai LEE, South San Francisco, CA (US); Brian J. EASTMAN, Napa, CA (US); Devin SPRATT, Mountain View, CA (US); Sarah Jane SHAPIRO, Pacifica, CA (US); Sonal JAIN, San Mateo, CA (US); Matthew VEROSLOFF, South San Francisco, CA (US); Jasmeet SINGH, Santa Clara, CA (US); Elizabeth M. HAWKINS, Redwood City, CA (US); Vaishnavi NAGESH, San Jose, CA (US); Lior KREINDLER, Foster City, CA (US); Sophia HUBBELL, San Francisco, CA (US); Carley Gelenter HENDRIKS, Burlingame, CA (US); Emma G. STANFIELD, San Francisco, CA (US); Amanda Claire BROWN, Brisbane, CA (US)

(21) Appl. No.: 18/393,023

(22) Filed: Dec. 21, 2023

Related U.S. Application Data
(63) Continuation of application No. PCT/US2022/034596, filed on Jun. 22, 2022.
(60) Provisional application No. 63/213,642, filed on Jun. 22, 2021.
(60) Provisional application No. 63/222,377, filed on Jul. 15, 2021.
(60) Provisional application No. 63/225,284, filed on Jul. 23, 2021.
(60) Provisional application No. 63/231,536, filed on Aug. 10, 2021.
(60) Provisional application No. 63/239,866, filed on Sep. 1, 2021.
(60) Provisional application No. 63/239,917, filed on Sep. 1, 2021.
(60) Provisional application No. 63/241,952, filed on Sep. 8, 2021.
(60) Provisional application No. 63/245,610, filed on Sep. 17, 2021.
(60) Provisional application No. 63/246,754, filed on Sep. 21, 2021.
(60) Provisional application No. 63/255,356, filed on Oct. 13, 2021.
(60) Provisional application No. 63/305,629, filed on Feb. 1, 2022.
(60) Provisional application No. 63/310,071, filed on Feb. 14, 2022.
(60) Provisional application No. 63/322,139, filed on Mar. 21, 2022.
(60) Provisional application No. 63/330,725, filed on Apr. 13, 2022.
(60) Provisional application No. 63/340,830, filed on May 11, 2022.
(60) Provisional application No. 63/351,751, filed on Jun. 13, 2022.

(51) Int. Cl. C12Q 1/6844; B01L 3/00; C12Q 1/34

(52) U.S. Cl. CPC C12Q 1/6844; B01L 3/5023; C12Q 1/34; B01L 2200/16; B01L 2300/0825; B01L 2400/06

(57) ABSTRACT

Various compositions and diagnostic devices for the detection of nucleic acids are provided. Also provided are systems comprising the same, and methods of using the same. In some embodiments, compositions and devices comprise or are configured to be used in combination with one or more of a guide nucleic acid, a programmable nuclease, and reporters. In some embodiments, presence of at least one sequence of interest is determined by detecting a signal produced upon cleavage of the reporters.

### CROSS-REFERENCE

[0001] This application claims priority to U.S. Provisional Application Ser. No. 63/213,642 filed on Jun. 22, 2021; U.S. Provisional Application Ser. No. 63/222,377 filed on Jul. 15, 2021; U.S. Provisional Application Ser. No. 63/225,284 filed on Jul. 23, 2021; U.S. Provisional Application Ser. No. 63/231,536 filed on Aug. 10, 2021; U.S. Provisional Application Ser. No. 63/239,866 filed on Sep. 1, 2021; U.S. Provisional Application Ser. No. 63/239,917 filed on Sep. 1, 2021; U.S. Provisional Application Ser. No. 63/241,952 filed on Sep. 8, 2021; U.S. Provisional Application Ser. No. 63/245,610 filed on Sep. 17, 2021; U.S. Provisional Application Ser. No. 63/246,754 filed on Sep. 21, 2021; U.S. Provisional Application Ser. No. 63/255,356 filed on Oct. 13, 2021; U.S. Provisional Application Ser. No. 63/305,629 filed on Feb. 1, 2022; U.S. Provisional Application Ser. No. 63/310,071 filed on Feb. 14, 2022; U.S. Provisional Application Ser. No. 63/322,139 filed on Mar. 21, 2022; U.S. Provisional Application Ser. No. 63/330,725 filed on Apr. 13, 2022; U.S. Provisional Application Ser. No. 63/340,830 filed on May 11, 2022; and U.S. Provisional Application Ser. No. 63/351,751 filed on Jun. 13, 2022, each of which is incorporated herein by reference in its entirety for all purposes.

### STATEMENT AS TO FEDERALLY SPONSORED RESEARCH

[0002] This invention was made with government support under Contract No. N66001-21-C-4048 awarded by the Department of Defense, Defense Advanced Research Projects Agency (DARPA). The US government has certain rights in the invention.

### SEQUENCE LISTING

[0003] The instant application contains a Sequence Listing which has been submitted electronically in XML format and is hereby incorporated by reference in its entirety. Said XML copy, created on Mar. 29, 2024, is named 203477-747301_US_SL.xml and is 2,182,193 bytes in size.

### BACKGROUND

[0004] Detection of ailments, especially at the early stages of disease or infection, can provide guidance on treatment or intervention to reduce the progression or transmission of said ailments. Such ailments can be detected at the point of need by devices capable of running diagnostic assays. Various biological species associated with an organism, disease state, phenotype, or genotype can be detected by these devices. Challenges in deploying such devices include developing methods to immobilize diagnostic assay components on surfaces without compromising the performance of the assay, as well as performing amplification of samples without significant additional instrumentation.

### SUMMARY

[0005] In an aspect, the present disclosure provides a programmable nuclease diagnostic device that may comprise a sample interface configured to receive a sample that may comprise at least one sequence of interest; a channel in fluid communication with the sample interface and a detection chamber, said channel comprising one or more movable mechanisms to separate the sample into a plurality of droplets, wherein said detection chamber is configured to receive and contact the plurality of droplets with at least one programmable nuclease probe disposed on a surface of said detection chamber, wherein said at least one programmable nuclease probe may comprise a guide nucleic acid complexed with a programmable nuclease; and a plurality of sensors that determine a presence of said at least one sequence of interest by detecting a signal produced upon cleavage of a target nucleic acid region of said at least one sequence of interest by said at least one programmable nuclease probe. In some embodiments, the cleavage of said target nucleic acid region occurs after a complementary binding of said target nucleic acid region to said guide nucleic acid of said at least one programmable nuclease probe. In some embodiments, the programmable nuclease probe may comprise a CRISPR/Cas enzyme. In some embodiments, the guide nucleic acid may comprise a guide RNA. In some embodiments, the one or more movable mechanisms comprise one or more valves configured to restrict flow through one or more sections of the channel. In some embodiments, the one or more movable mechanisms comprise a plunger or a bristle that is configured to restrict flow through one or more sections of the channel. In some embodiments, the one or more movable mechanisms are operatively coupled to a power source that is integrated with or insertable into the device. In some embodiments, the power source may comprise a battery. In some embodiments, the device may comprise a physical filter to filter one or more particles from the sample that do not comprise the sequence of interest. In some embodiments, the device may comprise a sample preparation chamber. In some embodiments, the sample preparation chamber may comprise a lysing agent. In some embodiments, the sample preparation chamber may comprise a heating unit configured for heat inactivation. In some embodiments, the sample preparation chamber may comprise one or more reagents for nucleic acid purification. In some embodiments, the channel may comprise a plurality of heating elements and a plurality of heat sinks for amplifying the at least one sequence of interest or a portion thereof. In some embodiments, the plurality of heating elements and the plurality of heat sinks are configured to perform one or more thermocycling operations on the plurality of droplets. In some embodiments, the device may comprise a plurality of programmable nuclease probes comprising different guide RNAs. In some embodiments, the signal is associated with a physical, chemical, or electrochemical change or reaction. In some embodiments, the signal may comprise an optical signal. In some embodiments, the signal may comprise a fluorescent or colorimetric signal. In some embodiments, the signal may comprise a potentiometric or amperometric signal. In some embodiments, the signal may comprise a piezo-electric signal. In some embodiments, the signal is associated with a change in an index of refraction of a solid or gel volume in which said at least one programmable nuclease probe is disposed.

[0006] In another aspect, the present disclosure provides a device that may comprise a sample interface configured to receive a sample that may comprise one or more target sequences of interest; one or more channels comprising one or more movable mechanisms to separate the sample into partitioned samples, wherein the one or more channels are in fluid communication with the sample interface and a reaction chamber that is configured to receive and contact the partitioned samples with an enzyme, reagent, or programmable detection agent that is configured to cleave a nucleic acid of said one or more target sequences of interest; and a plurality of sensors for determining a presence of the one or more target sequences of interest by detecting one or more reporters released upon said cleavage of said nucleic acid. In some embodiments, the programmable detection agent may comprise a CRISPR/Cas enzyme. In some embodiments, the one or more target sequences of interest comprise a sequence of nucleic acids comprising said nucleic acid. In some embodiments, the one or more movable mechanisms comprise a plurality of valves configured to restrict flow in a first direction through the one or more channels towards the sample interface. In some embodiments, the plurality of valves are configured to selectively permit flow in a second direction through the one or more channels towards the reaction chamber. In some embodiments, a first valve and a second valve of the plurality of valves are configured to physically, fluidically, or thermally isolate a first portion of the sample from a second portion of the sample when the first valve and the second valve are in a closed state. In some embodiments, the one or more channels comprise a plurality of heating elements and a plurality of heat sinks to perform thermocycling on the partitioned samples. In some embodiments, a first heating element of the plurality of heating elements and a first heat sink of the plurality of heat sinks are positioned between a first movable mechanism and a second movable mechanism of the one or more movable mechanisms. In some embodiments, the reporter may comprise a nucleic acid and a detection moiety. In some embodiments, the reporter may comprise at least one ribonucleotide or at least one deoxyribonucleotide. In some embodiments, the reporter may comprise a DNA nucleic acid or an RNA nucleic acid. In some embodiments, the device may comprise a telemedicine unit configured to provide one or more detection results to a computing unit that is remote from the device, wherein the one or more detection results indicate a presence or an absence of a target nucleic acid of interest in the sample.

[0007] In another aspect, the present disclosure provides a method for target detection, comprising: contacting a sample with any of the devices described herein; and detecting a presence or an absence of one or more genes of interest in said sample. In some embodiments, the method may comprise generating one or more detection results indicating the presence or the absence of the one or more genes of interest in the sample. In some embodiments, the method may comprise transmitting the one or more detection results to a remote computing unit. In some embodiments, the remote computing unit may comprise a mobile device. In another aspect, the present disclosure provides a method for target detection, comprising: providing a sample comprising at least one gene of interest; separating the sample into a plurality of sub-samples using one or more movable mechanisms; receiving the plurality of sub-samples in a detection chamber and contacting the plurality of sub-samples with at least one programmable nuclease probe disposed on a surface of said detection chamber, wherein said at least one programmable nuclease probe may comprise a guide nucleic acid complexed with a programmable nuclease; and using a plurality of sensors to determine a presence or an absence of said at least one gene of interest by detecting a signal produced upon cleavage of a target nucleic acid region in said at least one gene of interest by said at least one programmable nuclease probe. In some embodiments, the method may comprise amplifying the at least one gene of interest after separating the sample into a plurality of sub-samples. In some embodiments, the method may comprise amplifying the at least one gene of interest before the plurality of sub-samples are received in the detection chamber. In some embodiments, amplifying the at least one gene of interest may comprise using a plurality of heating elements and a plurality of heat sinks to perform thermocycling on the plurality of sub-samples. In some embodiments, the programmable nuclease probe may comprise a CRISPR/Cas enzyme. In some embodiments, the guide nucleic acid may comprise a guide RNA. In some embodiments, the one or more movable mechanisms comprise one or more valves configured to restrict flow through one or more sections of the channel. In some embodiments, the one or more movable mechanisms comprise a plunger or a bristle that is configured to restrict flow through one or more sections of the channel. In some embodiments, the method may comprise using a physical filter to filter one or more particles from the sample that do not comprise the at least one gene of interest. In some embodiments, the method may comprise lysing the sample before detecting the at least one gene of interest. In some embodiments, the method may comprise performing enzyme (e.g., PK) inactivation on the sample. In some embodiments, the method may comprise performing heat inactivation on the sample. In some embodiments, the method may comprise performing nucleic acid purification on the sample. In some embodiments, the method may comprise contacting the plurality of sub-samples with a plurality of programmable nuclease probes comprising different guide RNAs. In some embodiments, the signal is associated with a physical, chemical, or electrochemical change or reaction. In some embodiments, the signal is selected from the group consisting of an optical signal, a fluorescent signal, a colorimetric signal, a potentiometric signal, an amperometric signal, and a piezo-electric signal. In some embodiments, the signal is associated with a change in an index of refraction of a solid or gel volume in which said at least one programmable nuclease probe is disposed. In some embodiments, the method may comprise using the signal to detect pathogenic viruses, pathogenic bacteria, pathogenic worms, pathogenic fungi, or cancer cells. In some embodiments, the pathogenic viruses are selected from the group consisting of respiratory viruses, adenoviruses, parainfluenza viruses, severe acute respiratory syndrome (SARS), coronavirus, SARS-CoV, SARS-CoV-2, MERS, gastrointestinal viruses, noroviruses, rotaviruses, astroviruses, exanthematous viruses, hepatic viral diseases, cutaneous viral diseases, herpes, hemorrhagic viral diseases, Ebola, Lassa fever, dengue fever, yellow fever, Marburg hemorrhagic fever, Crimean-Congo hemorrhagic fever, neurologic viruses, polio, viral meningitis, viral encephalitis, rabies, sexually transmitted viruses, HIV, HPV, immunodeficiency viruses, influenza virus, dengue virus, West Nile virus, herpes virus, yellow fever virus, Hepatitis Virus C, Hepatitis Virus A, Hepatitis Virus B, and papillomavirus. In some embodiments, the method may comprise amplifying or modifying the signal using a physical or chemical interaction between a reporter that is released upon cleavage and another material, entity, or molecular species in the detection chamber. In some embodiments, the devices of the present disclosure are configured to detect pathogenic viruses, pathogenic bacteria, pathogenic worms, pathogenic fungi, or cancer cells based on the signal. In some embodiments, the pathogenic viruses are selected from the group consisting of respiratory viruses, adenoviruses, parainfluenza viruses, severe acute respiratory syndrome (SARS), coronavirus, SARS-CoV, SARS-CoV-2, MERS, gastrointestinal viruses, noroviruses, rotaviruses, astroviruses, exanthematous viruses, hepatic viral diseases, cutaneous viral diseases, herpes, hemorrhagic viral diseases, Ebola, Lassa fever, dengue fever, yellow fever, Marburg hemorrhagic fever, Crimean-Congo hemorrhagic fever, neurologic viruses, polio, viral meningitis, viral encephalitis, rabies, sexually transmitted viruses, HIV, HPV, immunodeficiency viruses, influenza virus, dengue virus, West Nile virus, herpes virus, yellow fever virus, Hepatitis Virus C, Hepatitis Virus A, Hepatitis Virus B, and papillomavirus. In some embodiments, the detection chamber or the reaction chamber of the device may comprise another material, entity, or molecular species that is configured to physically or chemically interact or react with a reporter that is released upon cleavage to amplify or modify the signal. In some embodiments, the sequence of interest may comprise a biological sequence. The biological sequence can comprise a nucleic acid sequence or an amino acid sequence. In some embodiments, the sequence of interest is associated with an organism of interest, a disease of interest, a disease state of interest, a phenotype of interest, a genotype of interest, or a gene of interest.

[0008] In another aspect, a reaction chamber may comprise a surface wherein a probe comprising at least one of said enzyme, said reagent, said programmable detection reagent, a programmable nuclease, a guide nucleic acid, a reporter or a combination thereof, and wherein said probe is immobilized to said surface by a linkage. In some embodiments, a linkage may comprise a surface functionality and a probe functionality. In some embodiments, a surface functionality is disposed on said surface. In some embodiments, a surface functionality is streptavidin. In some embodiments, an amino acid residue of said programmable nuclease is connected to said surface by said linkage. In some embodiments, an amino acid residue is modified with said probe functionality. In some embodiments, a probe functionality is biotin. In some embodiments, a guide nucleic acid is connected to said surface by said linkage. In some embodiments, a guide nucleic acid is modified at the 3′ end or 5′ end with said probe functionality. In some embodiments, a reporter is connected to said surface by said linkage. In some embodiments, a reporter may comprise at least one of said nucleic acid, said probe functionality, a detection moiety, a quencher or a combination thereof. In some embodiments, a reporter is configured for said detection moiety to remain immobilized to said surface and said quencher to be released into solution upon cleavage of said reporter. In some embodiments, a reporter is configured for said quencher to remain immobilized to said surface and for said detection moiety to be released into solution, upon cleavage of said reporter.

[0009] In one aspect, the present disclosure provides a composition comprising a plurality of reporters. In some embodiments, (a) each reporter of the plurality of reporters comprises one or more enzymes conjugated to a linker; (b) the linker comprises one or more nucleic acid sections; and (c) the linker (i) comprises a functionality for immobilization to a support, or (ii) is conjugated to the support. Conjugations can be covalent or non-covalent. In some embodiments, the one or more enzymes is a single enzyme, such as a single horseradish peroxidase (HRP). In some embodiments, the one or more enzymes comprises a poly-HRP comprising a plurality of HRP enzymes. In some embodiments, the plurality of HRP enzymes of the poly-HRP are complexed with streptavidin, and the linker comprises a biotin for conjugation with the poly-HRP. In some embodiments, the one or more nucleic acid sections comprise one or more sections of DNA, one or more sections of RNA, or a combination thereof. In some embodiments, the one or more nucleic acid sections consist of DNA. In some embodiments, the one or more nucleic acid sections consist of RNA. In some embodiments, the one or more nucleic acid sections comprise one or more sections of DNA and one or more sections of RNA. In some embodiments, the one or more nucleic acid sections are single-stranded. In some embodiments, the one or more nucleic acid sections have a combined length of at least 20, 30, 40, or 50 nucleotides. In some embodiments, at least one of the one or more nucleic acid sections is a substrate for cleavage by a programmable nuclease (e.g., any of the programmable nucleases described herein). In some embodiments, the linker comprises (a) a first portion comprising a non-naturally occurring guide nucleic acid, and (b) a second portion comprising a nucleic acid section that is a substrate for cleavage by a programmable nuclease, and the one or more enzymes (e.g., HRP) are conjugated to the linker via the second portion. In some embodiments, the linker further comprises one or more hydrocarbon chains. In some embodiments, the one or more hydrocarbon chains comprises a hydrocarbon chain between the one or more nucleic acid sections and the support. In some embodiments, the one or more hydrocarbon chains comprises a hydrocarbon chain between the one or more nucleic acid sections and the one or more enzymes. In some embodiments, the support is a bead, a hydrogel, or the surface of a container (e.g., a well or a tube). In some embodiments, the composition further comprises a programmable nuclease (e.g., any of the programmable nucleases described herein).

[0010] In one aspect, the present disclosure provides methods for detecting a target nucleic acid in a sample using a composition as described herein. In some embodiments, the method comprises (a) contacting the sample with a composition described herein to produce a reaction fluid, wherein (i) the linker is conjugated to the support, (ii) the composition further comprises a guide nucleic acid configured to bind to the target nucleic acid, and (iii) the programmable nuclease cleaves the linker in response to formation of a complex comprising the programmable nuclease, the guide nucleic acid, and the target nucleic acid; (b) separating the reaction fluid from the support; (c) contacting the separated reaction fluid with a substrate of the one or more enzymes, wherein presence of the one or more enzymes in the fluid produces a detectable signal from the enzyme substrate; and (d) detecting the detectable signal. In some embodiments, the method comprises (a) contacting the sample with a composition described herein to produce a reaction fluid, wherein (i) the composition further comprises a programmable nuclease and a guide nucleic acid, (ii) the guide nucleic acid is configured to bind to the target nucleic acid, and (iii) the programmable nuclease cleaves the linker in response to formation of a complex comprising the programmable nuclease, the guide nucleic acid, and the target nucleic acid; (b) contacting the reaction fluid with a plurality of beads, wherein each bead reacts with a plurality of the functionalities, thereby immobilizing the functionalities to the beads; (c) separating the reaction fluid from the beads; (d) contacting the separated reaction fluid with a substrate of the one or more enzymes, wherein presence of the one or more enzymes in the fluid produces a detectable signal from the enzyme substrate; and (e) detecting the detectable signal. In some embodiments, the method further comprises concentrating the one or more enzymes prior to contacting the one or more enzymes with the substrate, wherein the concentrating comprises separating the one or more enzymes from at least a portion of the separated reaction fluid. In some embodiments, concentrating comprises capture of the enzyme on a support. In some embodiments, contacting the separated reaction fluid with the substrate of the one or more enzymes comprises contacting the enzyme on the support with the substrate 2, 3, 4, 5, or more times. In some embodiments, the detectable signal comprises a change in an absorbance, and detection comprises detecting or measuring the change in absorbance.

[0011] In various aspects described herein, a reporter is connected to said surface by a linkage. In some embodiments, a linkage may comprise a surface functionality and a probe functionality. In some embodiments, a surface functionality is disposed on said surface and said reporter may comprise said probe functionality.

[0012] In certain aspects, described herein are embodiments of a method for target detection, comprising: providing a sample comprising at least one sequence of interest; separating the sample into a plurality of sub-samples using one or more movable mechanisms; receiving the plurality of sub-samples in a detection chamber and contacting the plurality of sub-samples with at least one probe, wherein said at least one probe is connected to a surface of said detection chamber by a linkage, wherein said at least one probe may comprise a programmable nuclease, a guide nucleic acid, a reporter or a combination thereof; and using a plurality of sensors to determine a presence of said at least one sequence of interest by detecting a signal produced upon cleavage of said reporter by said programmable nuclease.

[0013] Described herein are various embodiments of a device comprising: a sample interface configured to receive a sample that may comprise one or more target sequences of interest; one or more channels comprising one or more movable mechanisms to separate said sample into partitioned samples, wherein said one or more channels are in fluid communication with said sample interface and a reaction chamber comprising a surface, wherein at least one probe may comprise a programmable nuclease, a guide nucleic acid, a reporter or a combination thereof, wherein said at least one probe is connected to said surface by a linkage; and a plurality of sensors for determining a presence of said one or more target sequences of interest by detecting a signal emitted upon cleavage of said reporter by said programmable nuclease.

[0014] Described herein are various devices for detecting a target nucleic acid, comprising: a sample interface configured to receive a sample comprising a target nucleic acid; a reaction chamber (e.g., a heating region) in fluid communication with the sample interface and configured to amplify the sample received via the sample interface; a detection region in fluid communication with the heating region; and a programmable nuclease probe disposed within the sample interface, the heating region, and/or the detection region, wherein a signal is produced via selective binding between the programmable nuclease probe and the target nucleic acid within the heating region, the sample interface, and/or the detection region, wherein the detection region is configured to detect the signal corresponding to a presence of the target nucleic acid, and wherein the presence or absence of the target nucleic acid is determined within a time of less than 30 minutes after the sample is received at the sample interface. In some embodiments, a reagent mix comprising amplification reagents. In some embodiments, the reagent mix is lyophilized. In some embodiments, the reagent mix is located in a region of the device that is in fluid communication with both the sample interface and the heating region. In some embodiments, the reagent mix is located within the sample interface, the heating region, the detection region, and/or a region between the sample interface and the heating region. In some embodiments, the heating region comprises amplification reagents. In some embodiments, the sample is amplified via Loop-Mediated Isothermal Amplification (LAMP). In some embodiments, the heating region is configured to maintain an isothermal, or non-cycled temperature profile. In some embodiments, the isothermal, or non-cycled temperature profile is between about 30° C. to about 60° C. In some embodiments, the isothermal, or non-cycled temperature profile is about 55° C. to about 60° C. In some embodiments, the sample interface comprises a compartment configured to receive a swab containing the sample. In some embodiments, the compartment comprises a scraper configured to transfer the sample from the swab to the device. In some embodiments, the compartment contains a interface solution configured to extract the sample from the swab. In some embodiments, the interface solution comprises a buffer solution or a lysis buffer solution. In some embodiments, the sample interface is configured to receive the sample from a swab via pipetting. In some embodiments, the sample interface comprises a compartment configured to receive the sample from a container containing the sample. In some embodiments, the container comprises a syringe. In some embodiments, the syringe interface comprises an opening for receiving the sample therethrough. In some embodiments, the syringe interface opening is in fluid communication with i) the heating region, and/or ii) another compartment that is in fluid communication with the heating region. In some embodiments, the sample interface is configured to receive the sample as a fluid. In some embodiments, the heating region and detection region are disposed on the same location on the device. In some embodiments, the heating region and the detection region are disposed within a same compartment of the device. In some embodiments, the heating region comprises a channel for fluid movement therethrough. In some embodiments, the channel is in fluid communication with the sample interface and the detection region, either directly or indirectly, thereby enabling the sample to move from the sample interface to the detection region. In some embodiments, the channel comprises a spiral configuration or a serpentine configuration. In some embodiments, two or more channels for fluid movement therethrough, wherein at least one channel of the two or more channels is configured to move the sample from the sample interface to the detection region. In some embodiments, each channel of the heating region comprises one or more movable mechanisms. In some embodiments, the one or more movable mechanisms comprises i) a first movable mechanism between the sample interface and heating region for controlling transfer of the sample therebetween, and/or ii) a second movable mechanism between the heating region and the detecting region for controlling transfer of the sample therebetween. In some embodiments, at least one channel of the heating region comprises two or more heating compartments configured to separate the sample into two or more sub-samples, wherein the two or more compartments are separated from each other via a movable mechanism of the one or more movable mechanisms. In some embodiments, each heating compartment is configured to be heated by a corresponding heating element. In some embodiments, at least one heating element of the device comprises a chemical heating element. In some embodiments, at least one chemical heating element is sodium acetate. In some embodiments, the heating region comprises a chamber in fluid communication with the sample interface and the detection region. In some embodiments, the heating region comprises a reporter immobilized therein, wherein the report is configured to release a detection moiety via the selective binding between the activated programmable nuclease and the target nucleic acid, thereby enabling the signal to be produced. In some embodiments, the reporter is immobilized in the heating region via a support that is immobilized on a surface of the heating region. In some embodiments, the support comprises a bead, a coating, and an interspersed polymer. In some embodiments, the support comprises a solid support. In some embodiments, the surface of the heating region comprises a well that is a recessed portion of the surface, wherein the support is disposed within the well. In some embodiments, one or more channels are configured to move the sample from the sample interface to the detection region. In some embodiments, the one or more channels are located within the sample interface, between the sample interface and the heating region, within the heating region, between the heating region and the detection region, and/or within the detection region. In some embodiments, one or more channels comprises a plurality of channels, wherein the plurality of channels comprises at least one set of channels arranged in series. In some embodiments, the one or more channels comprises a plurality of channels, wherein the plurality of channels comprises at least one set of channels arranged in parallel (parallel channels), thereby enabling the sample to be split into sub-samples within each channel of the at least one set of parallel channels. In some embodiments, the one or more channels comprises a plurality of channels, wherein the plurality of channels comprises at least one set of channels configured to move the sample from a first location within the device to a second location within the device, thereby enabling the sample to be split into sub-samples within each channel of the at least one set of channels In some embodiments, the at least one set of channels comprises two or more channels having a different length and/or different configuration, thereby enabling specific conditions to be specified for two or more corresponding sub-samples. In some embodiments, the specific conditions comprise a specified heating temperature range, a specified heating duration, a specified residence time within any region or location on the device, a specific incubation time, contact with specific reagents, or any combination thereof. In some embodiments, the at least one set of channels comprises two or more channels having a same length and/or configuration, thereby enabling specific conditions to be specified for two or more corresponding sub-samples. In some embodiments, a channel of the one or more channels comprises a radial configuration, a spiral configuration, a serpentine configuration, a linear configuration, or any combination thereof. In some embodiments, at least one actuator. In some embodiments, the at least one actuator comprises a plunger, a spring-actuated plunger, or a spring mechanism. In some embodiments, the at least one actuator is manually actuated. In some embodiments, a first actuator of the at least one actuator is configured to move the sample from the sample interface to the heating region via manual actuation of the first actuator. In some embodiments, a second actuator of the at least one actuator is configured to move the detection moiety from the heating region to the detection region via manual actuation of the second actuator. In some embodiments, the device is configured to be operated manually without electrical power. In some embodiments, a power source. In some embodiments, the power source comprises one or more batteries. In some embodiments, the heating region is configured to heat the sample via a heating element. In some embodiments, the heating element comprises a chemical heating element. In some embodiments, the chemical heating element is sodium acetate. In some embodiments, the signal is visually detectable. In some embodiments, the programmable nuclease comprises a guide nucleic acid. In some embodiments, the guide nucleic acid is modified. In some embodiments, the guide nucleic acid is modified with at least one methyl group. In some embodiments, the programmable nuclease further comprises a Cas enzyme. In some embodiments, the Cas enzyme is selected from the group consisting Cas12, Cas13, Cas14, Cas14a, Cas14a1, and CasPhi. In some embodiments, the target nucleic acid is indicative of a respiratory disorder or respiratory pathogen. In some embodiments, the respiratory disorder or respiratory pathogen selected from the group consisting of SARS-CoV-2 and corresponding variants, 29E), NL63, OC43, HKU1, MERS-CoV, (MERS), SARS-CoV (SARS, Flu A, Flu B, RSV, Rhinovirus, Strep A, and TB. In some embodiments, the device is configured to differentiate between a viral infection and a bacterial infection. In some embodiments, the target nucleic acid is indicative of a sexually transmitted infection (STI) or infection related to a woman's health. In some embodiments, the STI or infection related to a woman's health is selected from the group consisting of CT, NG, MG, TV, HPV, Candida, B. Vaginosis Syphilis and UTI. In some embodiments, the target nucleic acid comprises a single nucleotide polymorphism (SNP). In some embodiments, the SNP is indicative of NASH disorder or Alpha-1 disorder. In some embodiments, the target nucleic acid is a blood borne pathogen selected from the group consisted of HIV, HBV, HCV and Zika. In some embodiments, the target nucleic acid is indicative of H. Pylori, C. Difficile, Norovirus, HSV and Meningitis. In some embodiments, a physical filter configured to filter one or more particles from the sample that do not comprise the target nucleic acid. In some embodiments, the physical filter is located between and in fluid communication with the sample interface and heating region. In some embodiments, the programmable nuclease, guide nucleic acid, or the reporter are immobilized to a device surface by a linkage. In some embodiments, the linkage comprises a covalent bond, a non-covalent bond, an electrostatic bond, a bond between streptavidin and biotin, an amide bond or any combination thereof. In some embodiments, the linkage comprises non-specific absorption. In some embodiments, the programmable nuclease is immobilized to the device surface by the linkage, wherein the linkage is between the programmable nuclease and the surface. In some embodiments, the reporter is immobilized to the device surface by the linkage, wherein the linkage is between the reporter and the surface. In some embodiments, the guide nucleic acid is immobilized to the surface by the linkage, wherein the linkage is between the 5′ end of the guide nucleic acid and the surface. In some embodiments, the guide nucleic acid is immobilized to the surface by the linkage, wherein the linkage is between the 3′ end of the guide nucleic acid and the surface. In some embodiments, a plurality of guide nucleic acids, wherein each guide nucleic acid of the plurality of guide nucleic acids is complementary, or partially complementary to a different segment of the target nucleic acid. In some embodiments, the sample comprises the sample containing the target nucleic acid(s), the sample containing the amplification reagents, the amplified sample, and/or the sample containing the detection moiety.

[0015] Described herein are various devices for detecting a target nucleic acid in a sample, comprising: a sample interface for receiving the sample; a reaction chamber (e.g., a heating region) in fluid communication with the sample interface, the heating region comprising: a programmable nuclease comprising a guide nucleic acid, and a reporter, wherein the programmable nuclease is activated by selective binding between the guide nucleic acid and a target nucleic acid, wherein the reporter is configured to release a detection moiety upon cleavage by the activated programmable nuclease; a chemical heating element configured to heat to the heating region; a detection region in fluid communication with the heating region, wherein the detection region is configured to detect a signal produced by the released detection moiety; a first manual actuator configured to transfer the sample from the heating region to the detection region; and a reagent mix comprising amplification reagents, wherein the reagent mix is disposed within the sample interface, the heating region, the detection region, and/or between the sample interface and the heating region, wherein the device is configured to determine the presence or absence of the target nucleic acid within a time of less than 30 minutes via the produced signal. In some embodiments, the reagent mix is lyophilized. In some embodiments, the heating region is configured to amplify the target nucleic acid. In some embodiments, the heating region comprises the amplification reagents. In some embodiments, the target nucleic acid is amplified via Loop-Mediated Isothermal Amplification (LAMP). In some embodiments, the heating region is configured to maintain an isothermal, or non-cycled temperature profile. In some embodiments, the isothermal, or non-cycled temperature profile is between about 30° C. to about 60° C. In some embodiments, the isothermal, or non-cycled temperature profile is about 55° C. to about 60° C. In some embodiments, the sample interface comprises a compartment configured to receive a swab containing the sample. In some embodiments, the compartment comprises a scraper configured to transfer the sample from the swab to the device. In some embodiments, the compartment contains an interface solution configured to extract the sample from the swab. In some embodiments, the interface solution comprises a buffer solution or a lysis buffer solution. In some embodiments, the sample interface is configured to receive the sample from a swab via pipetting. In some embodiments, the sample interface comprises a compartment configured to receive the sample from a container containing the sample. In some embodiments, the container comprises a syringe. In some embodiments, the syringe interface comprises an opening for receiving the sample therethrough. In some embodiments, the syringe interface opening is in fluid communication with the heating region, or another compartment that is in fluid communication with the heating region. In some embodiments, the sample interface is configured to receive the sample as a fluid. In some embodiments, the heating region and detection region are disposed on the same location on the device. In some embodiments, the heating region and the detection region are disposed within a same compartment of the device. In some embodiments, the heating region comprises a channel for fluid movement therethrough. In some embodiments, the channel is in fluid communication with the sample interface and the detection region, either directly or indirectly, thereby enabling the sample to move from the sample interface to the detection region. In some embodiments, the channel comprises a spiral configuration or a serpentine configuration. In some embodiments, two or more channels for fluid movement therethrough, wherein at least one channel of the two or more channels is configured to move the sample from the sample interface to the detection region. In some embodiments, each channel of the heating region comprises one or more movable mechanisms. In some embodiments, the one or more movable mechanisms comprises i) a first movable mechanism between the sample interface and heating region for controlling transfer of the sample therebetween, and/or ii) a second movable mechanism between the heating region and the detecting region for controlling transfer of the sample therebetween. In some embodiments, at least one channel of the heating region comprises two or more heating compartments configured to separate the sample into two or more sub-samples, wherein the two or more compartments are separated from each other via a movable mechanism of the one or more movable mechanism. In some embodiments, each heating compartment is configured to be heated by a corresponding heating element of at least one heating element. In some embodiments, the at least one heating element of the device comprises a chemical heating element. In some embodiments, the at least one chemical heating element is sodium acetate. In some embodiments, the heating region comprises a chamber. In some embodiments, the heating region comprises the reporter immobilized therein. In some embodiments, the reporter is immobilized in the heating region via a support that is immobilized on a surface of the heating region. In some embodiments, the support comprises a bead, a coating, and an interspersed polymer. In some embodiments, the support comprises a solid support. In some embodiments, the surface of the heating region comprises a well that is recessed portion of the surface, wherein the support is disposed within the well. In some embodiments, one or more channels are configured to move the sample from the sample interface to the detection region. In some embodiments, the one or more channels are located within the sample interface, between the sample interface and the heating region, within the heating region, between the heating region and the detection region, and/or within the detection region. In some embodiments, the one or more channels comprises a plurality of channels, wherein the plurality of channels comprises at least one set of channels arranged in series. In some embodiments, the one or more channels comprises a plurality of channels, wherein the plurality of channels comprises at least one set of parallel channels arranged in parallel (parallel channels), thereby enabling the sample to be split into sub-samples within each channel of the at least one set of parallel channels. In some embodiments, the one or more channels comprises a plurality of channels, wherein the plurality of channels comprises at least one set of channels configured to move the sample from a first location within the device to a second location within the device, thereby enabling the sample to be split into sub-samples within each channel of the at least one set of channels. In some embodiments, the at least one set of channels comprises two or more channels having a different length and/or different configuration, thereby enabling specific conditions to be specified for two or more corresponding sub-samples. In some embodiments, the specific conditions comprise a specified heating temperature range, a specified heating duration, a specified residence time within any region or location on the device, a specific incubation time, contact with specific reagents, or any combination thereof. In some embodiments, the at least one set of channels comprises two or more channels having a same length and/or configuration, thereby enabling specific conditions to be specified for two or more corresponding sub-samples. In some embodiments, a channel of the one or more channels comprises a radial configuration, a spiral configuration, a serpentine configuration, a linear configuration, or any combination thereof. In some embodiments, the at least one actuator comprises a plunger, a spring-actuated plunger, or a spring mechanism. In some embodiments, the device is configured to be operated manually without electrical power. In some embodiments, the device may comprise a power source. In some embodiments, the power source comprises one or more batteries. In some embodiments, the heating region is configured to heat the sample via a heating element. In some embodiments, the heating element comprises a chemical heating element. In some embodiments, the chemical heating element is sodium acetate. In some embodiments, the signal is visually detectable. In some embodiments, the guide nucleic acid is modified. In some embodiments, the guide nucleic acid is modified with at least one methyl group. In some embodiments, the programmable nuclease further comprises a Cas enzyme. In some embodiments, the Cas enzyme is selected from the group consisting Cas12, Cas13, Cas14, Cas14a, Cas14a1, and CasPhi. In some embodiments, the target nucleic acid is indicative of a respiratory disorder or respiratory pathogen. In some embodiments, the respiratory disorder or respiratory pathogen selected from the group consisting of SARS-CoV-2 and corresponding variants, 29E), NL63, OC43, HKU1, MERS-CoV, (MERS), SARS-CoV (SARS, Flu A, Flu B, RSV, Rhinovirus, Strep A, and TB. In some embodiments, the device is configured to differentiate between a viral infection and a bacterial infection. In some embodiments, the target nucleic acid is indicative of a sexually transmitted infection (STI) or infection related to a woman's health. In some embodiments, the STI or infection related to a woman's health is selected from the group consisting of CT, NG, MG, TV, HPV, Candida, B. Vaginosis Syphilis, and UTI. In some embodiments, the target nucleic acid comprises a single nucleotide polymorphism (SNP). In some embodiments, the SNP is indicative of NASH disorder or Alpha-1 disorder. In some embodiments, the target nucleic acid is a blood borne pathogen selected from the group consisted of HIV, HBV, HCV, and Zika. In some embodiments, the target nucleic acid is indicative of H. Pylori, C. Difficile, Norovirus, HSV, and Meningitis. In some embodiments, a physical filter configured to filter one or more particles from the sample that do not comprise the target nucleic acid. In some embodiments, the physical filter is located between and in fluid communication with the sample interface and heating region. In some embodiments, the programmable nuclease, guide nucleic acid, or the reporter are immobilized to a device surface by a linkage. In some embodiments, the linkage comprises a covalent bond, a non-covalent bond, an electrostatic bond, a bond between streptavidin and biotin, an amide bond or any combination thereof. In some embodiments, the linkage comprises non-specific absorption. In some embodiments, the programmable nuclease is immobilized to the device surface by the linkage, wherein the linkage is between the programmable nuclease and the surface. In some embodiments, the reporter is immobilized to the device surface by the linkage, wherein the linkage is between the reporter and the surface. In some embodiments, the guide nucleic acid is immobilized to the surface by the linkage, wherein the linkage is between the 5′ end of the guide nucleic acid and the surface. In some embodiments, the guide nucleic acid is immobilized to the surface by the linkage, wherein the linkage is between the 3′ end of the guide nucleic acid and the surface. In some embodiments, a plurality of guide nucleic acids, wherein each guide nucleic acid of the plurality of guide nucleic acids is complementary, or partially complementary to a different segment of the target nucleic acid. In some embodiments, the sample comprises the sample containing the target nucleic acid(s), the sample containing the amplification reagents, the amplified sample, and/or the sample containing the detection moiety.

[0016] Described herein are various embodiments for a microarray device for multiplexed detection of a plurality of target nucleic acids in a sample, comprising: a sample interface for receiving the sample; a reagent mix comprising amplification reagents; a reaction chamber (e.g., a heating region) in fluid communication with the sample interface; and a detection region comprising a surface comprising a plurality of detection spots in a microarray format, wherein each of the plurality of detection spots comprise a reporter probe, wherein each reporter probe is configured to release a detection moiety via cleavage by an activated programmable nuclease, wherein each of the plurality of detection spots comprise a different programmable nuclease probe, and wherein the device is configured to determine the presence or absence of each of the plurality of target nucleic acids within a time of less than 30 minutes via the release of each detection moiety of each reporter at each of the plurality of detection spots. In some embodiments, at least one programmable nuclease probe comprises a Cas enzyme. In some embodiments, each Cas enzyme of the at least one programmable nuclease is selected from the group comprising of Cas12, Cas13, Cas14, Cas14a, and Cas14a1. In some embodiments, the microarray device may comprise all the various embodiments of devices as described herein.

[0017] Described herein are various embodiment of a kit for the detection of a target nucleic acid in a sample, the kit comprising: a swab; elution reagents; lysis reagents; a device comprising a sample interface for receiving the sample; a reaction chamber (e.g., a heating region) in fluidic communication with the sample interface and configured to receive the sample, the heating region comprising a programmable nuclease comprising a guide nucleic acid and a reporter disposed within the heating region, wherein the programmable nuclease is activated by selective binding between the guide nucleic acid and the target nucleic acid, wherein the reporter is configured to release a detection moiety via the activated programmable nuclease; a chemical heating element configured to provide heat to the heating region; a detection region in fluid communication with the heating region and the sample interface, wherein the detection region is configured to detect a signal produced by the released detection moiety, thereby detecting the presence of the target nucleic acid; and a reagent mix comprising amplification reagents, wherein the reagent mix is disposed within the sample interface, the heating region, the detection region, and/or between the sample interface and the heating region, and wherein the device is configured to determine the presence or absence of the target nucleic acid within a time of less than 30 minutes via the released detection moiety. In some embodiments, the sample interface is configured to receive the sample from the swab. In some embodiments, a collection tube, wherein the collection tube is configured to accept the swab, wherein the sample contained in the swab is transferred to the collection tube, and wherein the collection tube is separate from the device. In some embodiments, the collection tube is configured to be inserted into the sample interface to transfer the sample to the device. In some embodiments, the collection tube is a syringe. In some embodiments, the kit comprises a first container containing the elution reagents and/or the lysis reagents. In some embodiments, the kit comprises dilution reagents. In some embodiments, the kit comprises a second container containing the dilution reagents. In some embodiments, the programmable nuclease comprises a Cas enzyme. In some embodiments, the Cas enzyme is selected from the group comprising of Cas12, Cas13, Cas14, Cas14a, and Cas14a1. In some embodiments, the kit may comprise all the various embodiments of devices, as described herein.

[0018] Described herein are various embodiments of a method for the detection of a target nucleic acid in a sample, the method comprising: providing a device configured to determine a presence or absence of a target nucleic acid in less than 30 minutes after a sample is introduced into the device, the device comprising a sample interface, a heating region in fluid communication with the sample interface, and a detection region in fluid communication with the heating region; introducing the sample into the sample interface of the device; mixing the sample with a reagent mix comprising amplification reagents to generate a mixed sample solution; transferring the mixed sample solution from the sample interface to the heating region; amplifying the sample by heating the mixed sample solution in the heating region; performing a programmable nuclease-based assay, wherein selective binding between a guide nucleic acid and the target nucleic acid activates a programmable nuclease probe configured to cleave a reporter probe, thereby releasing a detection moiety into the sample solution when the target nucleic acid is present; transferring the mixed sample solution with the amplified sample from the heating region to the detection region; and determining the presence or absence of the target nucleic acid in the sample via capture of the released detection moiety in the detection region. In some embodiments, the amplifying the target nucleic acid and the performing the programmable nuclease assay are performed as a one-pot reaction in the heating region. In some embodiments, the one-pot reaction is performed between about 30° C. to 60° C. In some embodiments, the one-pot reaction is performed at about 55° C. In some embodiments, the programmable nuclease of the one-pot reaction comprises a Cas enzyme, the Cas enzyme selected from the group comprising of Cas12, Cas13, Cas14, Cas14a, and Cas14a1. In some embodiments, the method further comprises filtering the sample with the reagent mix prior to entering the heating region. In some embodiments, the method further comprises filtering the sample comprises filtering one or more particles from the sample that do not comprise the target nucleic acid. In some embodiments, the filter is located between and in fluid communication with the sample interface and heating region. In some embodiments, the method further comprises a plurality of guide nucleic acids, each guide nucleic acid of the plurality of guide nucleic acids is complementary, or partially complementary to a different segment of the target nucleic acid. In some embodiments, the method further comprises, prior to step (a): providing a collection tube comprising a sample solution comprising the target nucleic acid; and transferring the sample solution to the device via inserting the collection tube into a sample interface of the device, wherein the sample solution dissolves and mixes with a lyophilized reaction mix comprising amplification reagents. In some embodiments, the method may comprise all of the embodiments the various devices, as described herein.

[0019] Described herein are various devices for detecting a target nucleic acid, comprising: a sample interface configured to receive a sample comprising the target nucleic acid; a first reaction chamber in fluid communication with the sample interface, wherein the first reaction chamber comprises a plurality of reporters; and a second reaction chamber in fluid communication with the first reaction chamber, wherein the second reaction chamber comprises an enzyme substrate, wherein each reporter of the plurality of reporters (i) is immobilized to a surface of the reaction chamber via a tether, (ii) comprised of a programmable nuclease-enzyme fusion protein complexed with a guide nucleic acid, the guide nucleic acid being configured to bind to the target nucleic acid, and (iii) configured to release the programmable nuclease-enzyme fusion protein following cleavage of the tether by the programmable nuclease-enzyme fusion protein bound to the target nucleic acid, and wherein release of the programmable nuclease-enzyme fusion protein is indicative of a presence or absence of the target nucleic acid in the sample. In some embodiments, the programmable nuclease-enzyme fusion protein comprises Cas12-HRP. In some embodiments, the tether of each reporter of the plurality of reporters comprises ssDNA. In some embodiments, the tether of each reporter of the plurality of reporters comprises RNA. In some embodiments, the tether of each reporter of the plurality of reporters comprises both ssDNA and RNA. In some embodiments, the programmable nuclease-enzyme fusion protein comprises Cas12-HRP. In some embodiments, the tether of each reporter of the plurality of reporters comprises RNA. In some embodiments, the enzyme substrate is HRP substrate. In some embodiments, the surface is configured to immobilize a nucleic acid. In some embodiments, the surface comprises streptavidin, biotin, an amine group, a carboxyl group, an epoxy group, an NHS group, a malemide group, or a thiol group. In some embodiments, the surface is a hydrogel surface. In some embodiments, the surface comprises an acrydite modification.

[0020] Described herein are various devices for detecting a target nucleic acid, comprising: a sample interface configured to receive a sample comprising the target nucleic acid; a first reaction chamber in fluid communication with the sample interface, wherein the first reaction chamber comprises a plurality of reporters; a second reaction chamber in fluid communication with the first reaction chamber, wherein the second reaction chamber comprises an enzyme substrate, wherein each reporter of the plurality of reporters comprises a programmable nuclease-split enzyme fusion protein complexed with a guide nucleic acid, the guide nucleic acid being configured to bind to the target nucleic acid, and wherein release of the programmable nuclease-split enzyme fusion protein is indicative of a presence or absence of the target nucleic acid in the sample. In some embodiments, the programmable nuclease-split enzyme fusion protein comprises HRP-L. In some embodiments, the device further comprises a programmable nuclease-split enzyme fusion protein comprising HRP-S. In some embodiments, the device is configured to produce a signal upon binding of the programmable nuclease-split enzyme fusion protein comprising HRP-L and binding of the programmable nuclease-split enzyme fusion protein comprising HRP-S to the target nucleic acid.

[0021] Described herein are various devices for detecting a target nucleic acid, comprising: a sample interface configured to receive a sample comprising the target nucleic acid; a first reaction chamber in fluid communication with the sample interface, wherein the first reaction chamber comprises a plurality of reporters, each reporter of the plurality comprising two or more [enzymes]; and a surface of the first reaction chamber, wherein each reporter of the plurality of reporters is immobilized to the surface of the first reaction chamber via a tether, and a second reaction chamber in fluid communication with the first reaction chamber, wherein the second reaction chamber comprises an enzyme substrate, and wherein cleaving the tether by a programmable nuclease complexed with a guide nucleic acid, the guide nucleic acid being configured to bind to the target nucleic acid, may release the two or more enzymes into solution, and wherein each enzyme of the two or more enzymes may be contacted with the enzyme substrate in the second reaction chamber to create a detectable and amplified signal indicative of a presence or absence of the target nucleic acid in the sample. In some embodiments, each enzyme of the two or more enzymes comprises HRP. In some embodiments, the reporter comprises a streptavidin comprising the two or more enzymes. In some embodiments, the tether contacts the surface via a biotin, an acrydite, or an amine. In some embodiments, the surface of the first reaction chamber is functionalized with a hydrogel, carboxyl group, or N-Hydroxysuccinimide (NHS). In some embodiments, the [tether] comprises a segment of cleavable DNA, cleavable RNA or a combination thereof. In some embodiments, the enzyme substrate comprises 3,3′,5,5′-tetramethylbenzidine (TMB). In some embodiments, the surface of the first reaction chamber comprises an inner wall of the first reaction chamber. In some embodiments, the surface of the first reaction chamber comprises a surface of a bead, wherein the bead is contained within the first reaction chamber. In some embodiments, the bead is a magnetic bead.

[0022] In one aspect, the present disclosure provides a composition for detecting a target nucleic acid, the composition comprising a programmable nuclease, a guide nucleic acid, a first reporter, an enzyme, and a second reporter. In some embodiments, (a) the guide nucleic acid is configured to bind to the target nucleic acid; (b) the programmable nuclease is effective to cleave the first reporter in response to formation of a complex comprising the programmable nuclease, the guide nucleic acid, and the target nucleic acid; (c) the cleavage of the first reporter is effective to separate a first nucleic acid section from a second nucleic acid section thereof; (d) the first nucleic acid section is effective to activate the enzyme; and (e) the activated enzyme is effective to cleave the second reporter to produce a detectable product comprising a detection moiety. In some embodiments, the enzyme is an endonuclease (e.g., NucC) and the second reporter comprises a polynucleotide substrate of the enzyme (e.g., cyclic triadenylate (cA3)). In some embodiments, the second nucleic acid section comprises RNA residues, optionally wherein the RNA residues comprise a plurality of uracil residues. In some embodiments, the second nucleic acid section comprises DNA residues, optionally wherein the DNA residues comprise a plurality of thymine residues. In some embodiments, (a) the second reporter comprises a fluorescent label and a quencher, and (b) cleavage of the second reporter by the activated enzyme is effective to separate the fluorescent label from the quencher.

[0023] In one aspect, the present disclosure provides a method of detecting a target nucleic acid in a sample. In some embodiments, the method comprises (a) contacting the sample with a composition described herein (e.g., a composition comprising a programmable nuclease, a guide nucleic acid, a first reporter, an enzyme, and a second reporter); (b) cleaving the first reporter with the programmable nuclease in response to formation of the complex comprising the programmable nuclease, the guide nucleic acid, and the target nucleic acid, thereby releasing the first nucleic acid section; (c) activating the enzyme with the first nucleic acid section; (d) cleaving the second reporter with the activated enzyme, thereby producing the detectable product comprising the detection moiety; and (e) detecting the detection moiety, thereby detecting the presence of the target nucleic acid in the sample. In some embodiments, the second reporter comprises a polynucleotide substrate of the enzyme, and the enzyme is a NucC. In some embodiments, step (d) is performed at a temperature of at least 40° C. In some embodiments, all of steps (b)-(d) are performed at a temperature of at least 40° C. (e.g., 45° C., 50° C., 55° C., 60° C., 65° C., or higher).

[0024] In one aspect, the present disclosure provides a composition for detecting a target nucleic acid in a reaction chamber, the composition comprising a programmable nuclease, a guide nucleic acid, a forward primer, a reverse primer, a polymerase, a nicking endonuclease, and a reporter. In some embodiments, (a) the guide nucleic acid is configured to bind to the target nucleic acid; (b) the forward primer comprises (i) a 5′ portion comprising a first hairpin, and (ii) a 3′ portion that is configured to bind the target nucleic acid at a first overlapping region with respect to the guide nucleic acid; (c) the reverse primer comprises (i) a 5′ portion comprising a second hairpin, and (ii) a 3′ portion that is configured to bind a complement of the target nucleic acid at a second overlapping region with respect to the guide nucleic acid; (d) the first and second hairpins are cleavage substrates for the nicking endonuclease; (e) the programmable nuclease is effective to cleave the reporter in response to formation of a complex comprising the programmable nuclease, the guide nucleic acid, and (i) the target nucleic acid or (ii) an amplicon of the target nucleic acid; and (f) the cleavage of the reporter is effective to produce a detectable product comprising a detection moiety. In some embodiments, (a) the sequence of the target nucleic acid to which the 3′ portion of the first primer is configured to bind defines a first sequence of the target nucleic acid; (b) the sequence of the 3′ portion of the reverse primer defines a second sequence of the target nucleic acid; and (c) the first sequence and second sequence are separated by about 5 to about 10 nucleotides along the target nucleic acid. In some embodiments, the 3′ portions of the forward primer and reverse primer are about 16 to about 20 nucleotides in length. In some embodiments, overlap between the 3′ portion of the reverse primer and the sequence to which the guide nucleic acid is configured to bind overlap by 1 to 5 nucleotides, 2 to 5 nucleotides, or 3 nucleotides. In some embodiments, the first hairpin and/or the second hairpin are 10 to 20 nucleotides in length, 16 to 20 nucleotides in length, or 16 nucleotides in length. In some embodiments, the programmable nuclease is a Cas protein, optionally wherein the Cas protein is a Cas12 protein or a Cas14 protein.

[0025] In a related aspect, the present disclosure provides a method of detecting a target nucleic acid in a sample using a composition described herein (e.g., a composition comprising a programmable nuclease, a guide nucleic acid, a forward primer, a reverse primer, a polymerase, a nicking endonuclease, and a reporter). In some embodiments, the method comprises: (a) contacting the sample with the composition; (b) performing nicking enzyme amplification reaction (NEAR) reaction to amplify the target nucleic acid; (c) forming a complex comprising the programmable nuclease, the guide nucleic acid, and (i) the target nucleic acid, or (ii) an amplicon of the target nucleic acid; (d) cleaving the reporter with the programmable nuclease activated by formation of the complex, thereby producing the detectable cleavage product; and (e) detecting the detection moiety, thereby detecting the presence of the target nucleic acid in the sample. In some embodiments, steps (b) through (d) are performed at about the same temperature (e.g., as in an isothermal reaction).

[0026] In one aspect, the present disclosure provides systems comprising a reaction chamber comprising a composition described herein, such as with regard to any of the various aspects described herein. In some embodiments, the reaction chamber is a chamber within a device disclosed herein.

### INCORPORATION BY REFERENCE

[0027] All publications, patents, and patent applications mentioned in this specification are herein incorporated by reference to the same extent as if each individual publication, patent, or patent application was specifically and individually indicated to be incorporated by reference.

### BRIEF DESCRIPTION OF THE DRAWINGS

[0028] The novel features of the invention are set forth with particularity in the appended claims. The patent or application file contains at least one drawing executed in color. Copies of this patent or patent application publication with color drawing(s) will be provided by the Office upon request and payment of the necessary fee. A better understanding of the features and advantages of the present invention will be obtained by reference to the following detailed description that sets forth illustrative embodiments, in which the principles of the invention are utilized, and the accompanying drawings of which:

[0029] FIG. 1 shows a process flow chart for a programmable nuclease-based detection device, whereby a sample comprising one or more target sequences is collected and prepared before the one or more target sequences are detected. Sample preparation includes compartmentalized thermocycling.

[0030] FIGS. 2A-2B show top down and cross-section views of a programmable nuclease-based detection device, as described herein.

[0031] FIGS. 3A-3B illustrate a cross sectional view of a programmable nuclease-based detection device comprising a plurality of thermocycling compartments with movable mechanisms, as described herein.

[0032] FIGS. 4A-4B illustrate a programmable nuclease probe comprising a programmable nuclease and a guide nucleic acid complexed with the programmable nuclease before and after a complementary binding event, as described herein.

[0033] FIGS. 5A-5B show a programmable nuclease probe before and after a complementary binding event and the generation of a signal indicating a presence of a target sequence or target nucleic acid, as described herein.

[0034] FIG. 6 illustrates a large molecular weight reporter that can undergo a reaction to generate an amplified signal that is detectable by a sensor, as described herein.

[0035] FIGS. 7A-7C illustrate various multiplexing embodiments of the programmable nuclease-based detection device, as described herein.

[0036] FIG. 8 illustrates an assay design for a point-of-need (PON) 5-plex respiratory panel.

[0037] FIG. 9 illustrates a PON disposable device, according to an embodiment, as described herein.

[0038] FIGS. 10A-10C illustrate a consumable and embodiments of components, as described herein.

[0039] FIGS. 11A-11D further illustrate various embodiments of components of a consumable, as described herein.

[0040] FIG. 12 illustrates valve positioning of the consumable device, as described herein.

[0041] FIG. 13 presents an oxidation curve for HERC2 gene DETECTR reaction with electrochemical reporters, as described herein.

[0042] FIG. 14 presents a reduction curve for HERC2 DETECTR reaction with electrochemical reporters, as described herein.

[0043] FIG. 15 presents a cyclic voltammogram taken before and after HERC2 DETECTR reaction, as described herein.

[0044] FIG. 16 presents an oxidation curve for SARS-CoV-2 DETECTR reaction with electrochemical reporters, as described herein.

[0045] FIG. 17 presents full data set for square wave voltammetry measurements of SARS-CoV-2 DETECTR reaction with electrochemical reporters and controls, as described herein.

[0046] FIG. 18 presents complexing master mix with R1763 (N-gene), as described herein.

[0047] FIG. 19 presents experimental conditions for square wave voltammetry measurements, as described herein.

[0048] FIGS. 20A-20C illustrates immobilization strategies for CRISPR-Cas diagnostic assay components, as described herein

[0049] FIG. 21 illustrates an embodiment where immobilization strategies are combined to enable CRISPR diagnostic readouts, as described herein.

[0050] FIG. 22 presents results for the evaluation of the compatibility of various chemical modifications to gRNAs, as described herein.

[0051] FIG. 23 presents results for the immobilization of gRNAs to a streptavidin coated surface, as described herein.

[0052] FIG. 24 presents results for immobilization of Cas protein-RNA complexes, as described herein.

[0053] FIGS. 25A-25B present results for immobilization of reporters, as described herein.

[0054] FIG. 26 presents results for functional testing of combined immobilized ribonucleoprotein (RNP) and reporter system, as described herein.

[0055] FIGS. 27A-27E present results for evaluation of different reporters for immobilization in combination with Cas complex immobilization, as described herein.

[0056] FIGS. 28A-28C present results for Cy5 reporter is functional for DETECTR, as described herein.

[0057] FIGS. 29A-29F present results for immobilization optimization involving the complex formation step, as described herein.

[0058] FIGS. 30A-30B present results for immobilization optimization involving a gRNA/reporter binding time and reporter concentration.

[0059] FIGS. 31A-31C present results showing target discrimination of modified gRNAs.

[0060] FIGS. 32A-32E present results showing biotin-modified Cas13a gRNA is functional.

[0061] FIG. 33 presents results of a streptavidin coated microscope slide with biotinylated reporter.

[0062] FIGS. 34A-34B present results of DETECR reaction on glass slide.

[0063] FIG. 35 present experiment conditions, as described herein.

[0064] FIG. 36 present experiment conditions, as described herein. Figure discloses SEQ ID NOS 1455-1456, 1492 and 1518, respectively, in order of appearance.

[0065] FIGS. 37A-37B present experiment conditions, as described herein.

[0066] FIGS. 38A-38B present experiment conditions, as described herein.

[0067] FIGS. 39A-39B present experiment conditions, as described herein.

[0068] FIGS. 40A-40B present experiment conditions, as described herein.

[0069] FIGS. 41A-41B present experiment conditions, as described herein.

[0070] FIG. 42 presents experiment conditions, as described herein.

[0071] FIG. 43 shows a layout for a DETECTR assay device.

[0072] FIG. 44 shows a schematic of a sliding valve device.

[0073] FIG. 45 shows a diagram of sample movement through the sliding valve device as shown in FIG. 44.

[0074] FIG. 46 presents results for sample preparation optimization for an initial lysis and concentration buffer screen.

[0075] FIG. 47 presents results for sample preparation optimization involving Hotpot with Cas 14a.1

[0076] FIG. 48 presents results for sample preparation optimization involving a LANCR

[0077] (Cas12 variant DETECTR using SEQ ID NO: 17) control run.

[0078] FIGS. 49A-49B present lyophilization optimization results with Group 1: Trehalose using RT-LAMP on the left and DETECTR on the right.

[0079] FIGS. 50A-50B present lyophilization optimization results for Group 2: PVP 40, sorbitol, Mannitol, Mannosse, using RT-LAMP MM with 3-8% of the candidate excipient as shown in FIG. 50A and results for DETECTR as shown in FIG. 50B.

[0080] FIGS. 51A-51B presents lyophilization optimization results for Group 2: PVP 40, Sorbitol, Mannitol, Mannose, using DETECTR MM with 3-5% of candidate excipient.

[0081] FIG. 52 presents lyophilization optimization results for RT-LAMP Mastermix in Trehalose Functionality Screening.

[0082] FIGS. 53A-53B presents lyophilization optimization results for DETECTR Mastermix in Trehalose, as described herein.

[0083] FIGS. 54A-54B present results for HotPot involving LAMP amplification with Cas14a DETECTR in single reaction volume (one-pot).

[0084] FIG. 55 presents results for RT-LAMP amplification with Cas14a DETECTR in single reaction volume (one-pot).

[0085] FIGS. 56A-56B presents results for identifying buffers that are compatible with Cas14a and low temperature RT-LAMP (LowLAMP).

[0086] FIG. 57 presents results involving the impact of individual components on the performance of Cas 14 at low temperature RT-LAMP conditions.

[0087] FIG. 58 presents results for LAMP amplification with Cas14a DETECTR in single reaction volume (one-pot).

[0088] FIG. 59A-59B presents results for one-pot Cas14 with LowLAMP at 50 C.

[0089] FIG. 60 presents results for one-pot Cas14 with Bsm DNA polymerase at 55 C.

[0090] FIG. 61 presents results for a limit of detection study involving one-pot DETECTR (HotPot).

[0091] FIG. 62 presents results for a limit of detection study involving one-pot DETECTR (HotPot), where two different DNA polymerases at 55 C were tested.

[0092] FIG. 63 presents results for a study involving replacing Bst polymerase in the NEAR assay, showing enablement for SARS-CoV-2 detection at lower temperatures.

[0093] FIG. 64 presents results for NEAR assay amplification functions in Cas14a optimal buffers.

[0094] FIG. 65 presents results for Cas14a functions in a range of KOAc salt concentrations.

[0095] FIG. 66 presents results for a study involving increasing concentrations of KOAc to improve NEAR performance in Cas14a optimal buffers.

[0096] FIG. 67 presents results for a study involving increasing concentrations of KOAc to improve NEAR performance in Cas14a optimal buffers.

[0097] FIGS. 68A-68B present sequences and results for performance of Cas14a.1 crRNAs on SARS-CoV-2 E-gene amplicon, respectively. FIG. 68A discloses SEQ ID NOS 1519.

[0098] FIG. 69 presents results for the evaluation of the performance of Klenow (exo-) NEAR assay in IB13 buffer at decreasing salt concentrations.

[0099] FIG. 70 presents an overview of sRCA.

[0100] FIG. 71 presents results from screening dumbbell DNA templates for sRCA.

[0101] FIG. 72 presents results from a study involving the ability of Cas14a to detect product of RCA reaction across increasing temperatures.

[0102] FIG. 73 presents results from a study involving the effects of trigger oligos.

[0103] FIG. 74 presents results from a study involving a titration of trigger oligos for Cas14 one-pot sRCA.

[0104] FIG. 75 presents results from evaluating a Cas12 variant (SEQ ID NO: 17) in one-pot sRCA.

[0105] FIG. 76 presents an overview of RCA positive feedback for Cas13.

[0106] FIG. 77 presents results from evaluating Cas13-compatible DNA templates for RCA.

[0107] FIG. 78 presents results from a study evaluating whether a Cas13-compatible DNA template is functional in RCA.

[0108] FIG. 79 presents results from a study involving Cas13 functionality in a one-pot sRCA reaction across increasing temperatures.

[0109] FIG. 80 presents an overview of CasPin.

[0110] FIG. 81 presents potential hairpin structures for CasPin.

[0111] FIG. 82 presents results for an initial design using two hairpins. Figure discloses SEQ ID NO: 1520.

[0112] FIG. 83 presents a schematic of combined gRNA and reporter immobilization on the left and results for immobilization of DETECTR components using NHS-Amine chemistries on the right.

[0113] FIG. 84 presents results from optimizing the conjugation buffer to reduce non-specific binding.

[0114] FIG. 85 presents results from a study involving immobilizing different combinations of reporter+guide+Cas12 variant (SEQ ID NO: 17).

[0115] FIG. 86 presents results from a study optimizing gRNA and target concentrations to improve signal-to-noise ratio for immobilized DETECTR.

[0116] FIGS. 87A-87B present modifications and results from evaluating various amino modifications for DETECTR immobilization, respectively.

[0117] FIG. 88 presents results for the FASTR assay, involving detection of SARS-CoV-2 with rapid thermocycling+CRISPR Dx.

[0118] FIG. 89 presents results from a study to determine top performing polymerases and buffers for the FASTR assay.

[0119] FIG. 90 presents results for single copy detection of SARS-CoV-2 with FASTR.

[0120] FIG. 91 presents results for variations on rapid cycling times for denaturation and annealing/extension in FASTR.

[0121] FIG. 92 presents results for minimizing RT time for FASTR.

[0122] FIG. 93 presents results for higher pH buffers that improve FASTR performance.

[0123] FIG. 94 presents results for FASTR compatibility with crude lysis buffers.

[0124] FIG. 95 presents results for non-optimized multiplexing of FASTR.

[0125] FIG. 96 presents results for multiplex FASTR.

[0126] FIG. 97 presents results for the limit of detection of multiplex FASTR.

[0127] FIG. 98 presents key primers and gRNAs. Figure discloses SEQ ID NOS 1521-1529, respectively, in order of appearance.

[0128] FIGS. 99A-99B present results for a one-pot master mix of both RT-LAMP and DETECTR assay reagents pooled together. Aliquots of the same reaction mixture containing Cas12 variant (SEQ ID NO: 17) were run separately for each assay. FIG. 99A shows results for the RT-LAMP assay and FIG. 99B shows results for the DETECTR assay.

[0129] FIG. 100 presents results for the reconstituted Cas12-based DETECTR master mix after lyophilization (using a Cas12 variant (SEQ ID NO: 17)).

[0130] FIG. 101 presents results for a Cas14a1-based DETECTR assay.

[0131] FIGS. 102A-102B present results for RT-LAMP and Cas12-based DETECTR assays where one sample containing the reagent master mix was stored for two weeks prior to lyophilization (using a Cas12 variant (SEQ ID NO: 17)).

[0132] FIG. 103 presents results for small volume, lyophilized reaction master mixes.

[0133] FIG. 104 presents dynamic scanning calorimetry results for a pooled, lyophilized master mix of DETECTR and RT-LAMP reagents.

[0134] FIG. 105 presents a list of excipients.

[0135] FIG. 106 presents results for a one-pot DETECTR assay ran on a handheld microfluidic device.

[0136] FIGS. 107A-107B illustrate an embodiment of a multiplex lateral flow strip, as described herein.

[0137] FIG. 108 illustrates an embodiment of a workflow with multiplex “HotPot” as described herein.

[0138] FIG. 109 illustrates an embodiment for HRP paper-based detection, as described herein.

[0139] FIG. 110 illustrates an embodiment for an HRP-based multiplex lateral flow assay, as described herein.

[0140] FIG. 111 illustrates an embodiment for Multiplexed Cas13 immobilization approach to an HRP-based multiplex lateral flow assay, as described herein.

[0141] FIG. 112 shows results for both DNAse and DETECTR based assays for two replicate runs a week apart.

[0142] FIGS. 113A-113B illustrate the use of multiple Cas-complex probes guide pooling enhanced signal detection to a lateral flow assay, as described herein.

[0143] FIG. 114 depicts results of a DETECTR assay showing enhanced Cas12a-based detection of the GF184 target using a pooled-guide (pooled-gRNA) format compared to DETECTR Cas12a-based assay using an individual gRNA format.

[0144] FIG. 115 depicts results of a DETECTR assay showing enhanced sensitivity of the Cas13a-based detection of the SC2 target using a pooled-guide format compared to the Cas13a-based assays using an individual guide format.

[0145] FIG. 116 shows images corresponding to each chamber, used to count the number of positive droplets, showing that the Cas13a-DETECTR assay samples containing the pooled guide RNAs generated more crystals containing the amplified products per starting copy of the target RNA than the Cas13a-DETECTR assay samples containing the guide RNAs in individual format.

[0146] FIG. 117 shows that measurement of signal intensity following amplification showed that the Cas13a-DETECTR assay samples containing the pooled guide RNAs generated more signal intensity per starting copy of the target template RNA than the Cas13a-DETECTR assay samples containing the guide RNAs in individual format.

[0147] FIG. 118 shows that measurement of signal intensity following amplification showed that the Cas13a-DETECTR assay samples containing the pooled guide RNAs generated more signal intensity per starting copy of the target template RNA than the Cas13a-DETECTR assay samples containing the guide RNAs in individual format. FIG. 118 also shows that relative quantification performed by counting the number of positive droplets showed that the Cas13a-DETECTR assay samples containing the pooled guide RNAs generated more crystals containing the amplified products per starting copy of the target template RNA than the Cas13a-DETECTR assay samples containing the guide RNAs in individual format.

[0148] FIG. 119 shows that Cas13a DETECTR assay samples containing the pooled guides (R4637, R4638, R4667, R4676, R4684, R4689, R4691) did not exhibit higher target detection sensitivity per starting copy of the target than the Cas13a DETECTR samples containing the single guides R4684, R4667, or R4785 (RNAseP guide) in individual format.

[0149] FIG. 120 illustrates an embodiment of a handheld device comprising a lateral flow assay, as described herein.

[0150] FIGS. 121A-121B illustrate an embodiment of a point of care device comprising a lateral flow assay, as described herein.

[0151] FIG. 122 illustrates an embodiment of a point of care device comprising a lateral flow assay, as described herein.

[0152] FIG. 123 illustrates an embodiment of a point of care device comprising a lateral flow assay and a spiral reaction chamber as described herein.

[0153] FIG. 124 illustrates an embodiment of a point of care device comprising switch triggers for triggering device actuators as described herein.

[0154] FIG. 125 illustrates an embodiment of a reaction chamber that is coupled to an input port and is substantially spiral in shape as described herein.

[0155] FIG. 126 illustrates an embodiment of a housing structure for lateral flow assays comprising channel structures of substantially the same contour length for each assay as described herein.

[0156] FIGS. 127A-127B illustrates an embodiment of a point of care device before actuation and after partial actuation of device actuators as described herein.

[0157] FIGS. 128A-128B illustrates an embodiment of a chemical heating element and its time-dependent temperature profile as described herein.

[0158] FIGS. 129A-129B illustrates embodiments of lateral flow strips configurations as described herein.

[0159] FIG. 130 illustrates an embodiment of a point of care device comprising a chemical heating element and an electrical heating element.

[0160] FIGS. 131A-131B illustrates results of DETECTR assays showing successful nucleic acids amplification utilizing one of the point of care device embodiments described herein.

[0161] FIG. 132 illustrates results of DETECTR assays showing successful detection of nucleic acids utilizing one of the flow strip assay embodiments described herein.

[0162] FIG. 133 illustrates a flow diagram of a process used to evaluate, characterize, and optimize proteins for diagnostic applications.

[0163] FIG. 134 illustrates a schematic showing a workflow for the process using Labcyte Echo.

[0164] FIG. 135 shows experimental results for fluorescence of three candidate Cas enzymes.

[0165] FIG. 136 shows the performance of three candidate Cas enzymes at different temperatures and buffers.

[0166] FIG. 137 shows the results of testing conducted with CasM. 1740 with three additional buffers at 35° C.

[0167] FIG. 138 shows the results of experiments investigating the limits of detection on single-strand oligo or synthetic dsDNA target at 35° C.

[0168] FIG. 139 shows the results of experiments evaluating the limit of detection at both 35° C. and the highest temperature that the protein was demonstrated to function at for CasM.1740.

[0169] FIG. 140 shows the results of experiments investigating the effects of additives and assay formulations on the performance of the proteins.

[0170] FIG. 141 shows the results for single nucleotide mutation sensitivity experiments with CasM.124070.

[0171] FIG. 142 shows the results for single nucleotide mutation sensitivity experiments with CasM.08.

[0172] FIG. 143 shows the results for single nucleotide mutation sensitivity experiments with CasM.124070 and CasM.08 with the same target site.

[0173] FIGS. 144A-144B show the results of experiments investigating the kinetics of trans-cleavage for proteins that have the best performance in terms of sensitivity, specificity, or thermostability.

[0174] FIG. 145 summarizes the performance results for various Cas enzymes.

[0175] FIG. 146 shows a schematic of an exemplary workflow for a multiplexed programmable nuclease assay.

[0176] FIGS. 147 and 148 show an exemplary, a non-limiting handheld device for performing a multiplexed programmable nuclease (e.g., DETECTR) assay.

[0177] FIG. 149 shows an exemplary hydrogel comprising immobilized reporters co-polymerized therein.

[0178] FIGS. 150A and 150B show exemplary multiplexing strategies for hydrogel immobilized DETECTR systems.

[0179] FIGS. 151A-151B show an exemplary positive feedback system for signal amplification.

[0180] FIG. 152 shows an exemplary workflow for DETECTR-based HotPot reactions.

[0181] FIG. 153 shows fluorescence results of HotPot reactions with reporters immobilized on glass beads.

[0182] FIG. 154 shows lateral flow strip results using samples from the same experiments conducted to yield results illustrated in FIG. 153.

[0183] FIG. 155 shows fluorescence results of HotPot reactions with reporters immobilized on magnetic beads.

[0184] FIG. 156 shows fluorescence results of DETECTR-based HotPot assays for a variety of respiratory disease nucleic acid sequence targets.

[0185] FIGS. 157A-157C shows results of limit of detection experiments for initial HotPot assay testing.

[0186] FIG. 158 shows the fluorescence detected from HotPot assays in the presence of various additives.

[0187] FIGS. 159A-159B shows the influence of select additives that increase the speed and/or the signal strength of some HotPot assays.

[0188] FIG. 160 shows HotPot results from experiments conducted with various amounts of a few additives.

[0189] FIG. 161 shows HotPot results from experiments conducted with various amounts of a few additives with BSM DNA Polymerases.

[0190] FIGS. 162A-162B show lateral flow assay results of DETECTR-based OnePot and HotPot assays conducted with hydrogels comprising immobilized reporters.

[0191] FIGS. 163A-163D illustrate a non-limiting example of a handheld device for performing a multiplexed programmable nuclease (e.g., DETECTR) assay.

[0192] FIG. 164 presents results depicting the enhancement of the signal generated in a Hotpot reaction with the addition of Thermostable Inorganic Pyrophosphatase (TIPP) in comparison to control conditions lacking TIPP, target RNA or both.

[0193] FIGS. 165A-165B present results from DETECTR lateral flow Hotpot reaction assay strips, depicting the enhancement of the signal generated in a Hotpot reaction with the addition of Thermostable Inorganic Pyrophosphatase (TIPP) in comparison to control conditions lacking TIPP, target RNA or both.

[0194] FIG. 166 shows a schematic of the NEAR reaction. A forward and reverse primer consisting of a nicking enzyme stabilization site and recognition region able amplify a target region of interest into a single-stranded DNA molecule. A guide RNA will bind a region complementary to the amplified ssDNA, allowing further detection by a DETECTR system.

[0195] FIGS. 167A-167B show an exemplary NEAR-DETECTR reaction. FIG. 167A show a forward and reverse primer flanking the target region. In addition, a panel of 19 guide RNAs are shown in comparison to the amplicon. FIG. 167A discloses SEQ ID NOS 53, 1530 and 54, respectively, in order of appearance. FIG. 167B shows the detection of the amplicon using NEAR-DETECTR using the above mentioned guide RNAs.

[0196] FIGS. 168A-168B shows an example NEAR reaction with an exemplary guide RNA showing detection of the E-gene of SARS-CoV2. FIG. 168A shows an example NEAR reaction with forward and reverse NEAR primers with a guide RNA. FIG. 168A discloses SEQ ID NO: 1531. FIG. 168B shows the NEAR-DETECTR reaction following amplification, showing the resulting signal of 20,000 copies or 0 copies of the amplicon in solution.

[0197] FIG. 169 shows the resulting signal of a NEAR-DETECTR reaction in which the pre-amplification time is varied prior to DETECTR.

[0198] FIG. 170 shows the comparison of the NEAR-DETECTR reaction using orthogonal Cas systems (Cas12 Variant (SEQ ID NO: 17), Cas13 Variant (SEQ ID NO: 21), and Cas14 Variant (SEQ ID NO. 3)). The experiments were performed in the presence or absence of the target NEAR amplicon, showing different cleavage preferences for the reporter molecule.

[0199] FIG. 171 shows the optimization of the NEAR reaction using different magnesium (Mg2+) concentrations. This shows the time to result (in minutes) comparing different buffer compositions and different concentrations of added magnesium. The top panel shows the following conditions using Bst2.0, and the bottom panel shows the following experimental conditions using Bst.3.0. These results informed the following experimental conditions for the NEAR reaction: Bst2.0, 12 mM Mg2+, at 60 C, resulting in a less than 5 minute amplification time and approximately 20,000 copies.

[0200] FIGS. 172A-172B shows the experimental design of the primer and guide RNA design and the results of these designs. In FIG. 172A, eight primer pairs (R1763 F (1-8)/R (1-8)) and the guide RNA R1763. FIG. 172A discloses SEQ ID NO: 1532. In FIG. 172B, the aforementioned primers pairs and guides R1763 and R1765 are used in a NEAR-DETECTR reaction to determine the efficacy of the reaction using different primer pairs. The raw fluorescence (AU) of the NEAR-DETECTR reaction is reported.

[0201] FIGS. 173A-173B describes the optimization of the hinge stabilization region in the NEAR primers to determine if the nicking enzyme activity can be modulated. In FIG. 173A, the hinge stabilization loop region is modified to alter the melting temperature of the stem loop. In FIG. 173B, the modified stem loops as shown in FIG. 173A were used to for detection of the SARS-CoV-2 E-gene using different inputs of amplicons resulting from a NEAR amplification (1,000, 500, and 200 input amplicon copies).

[0202] FIG. 174 shows a comparison of a reverse transcription-NEAR-DETECTR (RT-NECTR) reaction using different reverse transcriptases. Wartmstart RTx (NEB), Bst 3.0, and Omniscript RT (Qiagen) were used on different amounts of input RNA in order to compare the limit of detection (LOD) of these reaction conditions.

[0203] FIG. 175 shows the experimental results of an RT-NECTR reaction using differing concentrations of NEAR primers.

[0204] FIG. 176 shows the LOD of the E-gene of SARS-CoV-2 using RT-NECTR using different amplification times and input copies for the RT-NECTR reaction.

[0205] FIG. 177 shows detection of the SARS-CoV-2 E gene using different Cas systems (Cas12 Variant (SEQ ID NO: 17), Cas13 Variant (SEQ ID NO: 21), and Cas14 Variant (SEQ ID NO. 3)) and a panel of different guides (SEQ ID NO: 76-SEQ ID NO: 82).

[0206] FIG. 178 shows an exemplary, a non-limiting handheld device for performing a programmable nuclease (e.g., DETECTR) assay.

[0207] FIG. 179 shows a cross-sectional view of the device of FIG. 178.

[0208] FIG. 180 shows a reaction channel component of the device of FIG. 178.

[0209] FIG. 181 shows an isometric view of a detection pen of the device of FIG. 178.

[0210] FIG. 182 shows a cross-sectional view of the detection pen of FIG. 181.

[0211] FIG. 183 shows an exploded view of the detection pen of FIG. 181.

[0212] FIG. 184 shows a cross-sectional view of a sample preparation reservoir of the device of FIG. 178.

[0213] FIG. 185 shows a point of care device for performing a multiplexed programmable nuclease (e.g., DETECTR) assay.

[0214] FIG. 186 shows an exploded view of device of FIG. 185 with fluidic chip assembly disposed between chemical heating packs.

[0215] FIGS. 187A-187C show various views of the chip assembly of the device of FIG. 185. FIG. 187A shows a perspective view of a chip assembly comprising a fluidic chip, a plunger assembly, and a detection clip. FIG. 187B shows a top view of the chip assembly of FIG. 187A. FIG. 187C shows a front view of a detection card configured to be inserted into a detection interface of the detection clip of FIG. 187A.

[0216] FIG. 188 shows side and top views of the fluidic chip of FIG. 187A.

[0217] FIGS. 189A-189C show front (FIG. 189A), side (FIG. 189B), and cross-sectional (FIG. 189C) vies of the fully assembled chip assembly of FIG. 185 including a fluidic chip, a plunger assembly, a detection clip, and a detection card.

[0218] FIGS. 190A-190D show perspective (FIG. 190A), top (FIG. 190B), side (FIG. 190C), and bottom (FIG. 190D) views showing various configurations of the fluidic chip and plunger assembly in use. Prior to use, the plunger assembly may be disposed within the fluidic chip in an initial configuration as shown in the middle row. After the sample is added to the sample interface, the plunger assembly may be pulled back into a loaded configuration to draw the sample into the reaction chamber/channel as shown in the top row. After the amplification and/or DETECTR reactions are run, the plunger assembly may be pushed into a dispensing configuration to push the sample out of the reaction chamber/channel and into the sample interface/detection interface as shown in the bottom row. The detection card comprising lateral flow assay strips may then be inserted into the detection interface and the detection region may be visualized to determine if the target nucleic acid was present in the sample as described herein.

[0219] FIGS. 191A-191C show cross-sectional side (left) and top (right) views highlighting various configurations of the fluidic chip and plunger assembly in use. Prior to use, the plunger assembly may be disposed within the reaction chamber/channel of the fluidic chip in an initial configuration as shown in FIG. 191B. After the sample is added to the sample interface, the plunger assembly may be pulled back into a loaded configuration to draw the sample into the reaction chamber/channel as shown in FIG. 191A. A locking mechanism may prevent the plunger assembly from moving during the reaction. After the amplification and/or DETECTR reactions are run, the plunger assembly may be pushed into a dispensing configuration to push the sample out of the reaction chamber/channel and into the sample interface/detection interface as shown in FIG. 191C. A locking release mechanism may be actuated (e.g., by squeezing) to release the locking mechanism and allow the plunger assembly to move between configurations. The detection card comprising lateral flow assay strips may then be inserted into the detection interface and the detection region may be visualized to determine if the target nucleic acid was present in the sample as described herein.

[0220] FIGS. 192A-192B show a signal amplification strategy involving the release of a tethered enzyme by a programmable nuclease. Presence of a target nucleic acid may activate the programmable nuclease, which may cleave a nucleic acid tether that immobilizes the enzyme on a surface. Cleaving the nucleic acid tether may release the enzyme into solution, which may be contacted with an enzyme substrate to create a detectable and amplified signal.

[0221] FIGS. 193A-193C show a signal amplification strategy involving the release of a programmable nuclease-enzyme fusion protein. Presence of a target nucleic acid may activate a programmable nuclease portion of the programmable nuclease-enzyme fusion protein, wherein the activated programmable nuclease may cleave a nucleic acid tether that immobilizes the programmable nuclease-enzyme fusion protein on a surface. Cleaving the nucleic acid tether may release the programmable nuclease-enzyme fusion protein into solution, wherein an enzyme portion of the programmable nuclease-enzyme fusion protein may be contacted with an enzyme substrate to create a detectable and amplified signal. In some cases, contacting may comprise contacting the solution comprising the released programmable nuclease-enzyme fusion protein with another solution comprising the enzyme substrate.

[0222] FIG. 194 shows a signal generation and amplification strategy involving the binding of two programmable nuclease-split enzyme fusion proteins with a target nucleic acid, wherein the two programmable nuclease-split enzyme fusion proteins each comprise an inactivated programmable nuclease portion and a split enzyme subunit portion. The programmable nuclease portion of each programmable nuclease-split enzyme fusion protein may be configured to bind to a different portion of a target nucleic acid. When the inactivated programmable nuclease portion of each programmable nuclease-split enzyme fusion protein binds to the target nucleic acid, the split enzyme subunit portion of each programmable nuclease-split enzyme fusion protein may dock to form an active enzyme. The active enzyme may be contacted with an enzyme substrate to create a detectable and amplified signal.

[0223] FIGS. 195A-195E show various exemplary reporters for use in the signal amplification strategy shown in FIGS. 192A-192B. Each reporter comprises at least one of the following: a detection moiety comprising a horseradish peroxidase (HRP) enzyme for signal enhancement, a nucleic acid-based linker-section, and a functionality for immobilization to a surface. In some embodiments, a carbon spacer may be positioned between the functionality and the nucleic acid and/or detection moiety. In FIG. 195A (e.g., rep161), the reporter comprises an enzyme (e.g., an HRP enzyme), a nucleic acid-based linker (e.g., a single-stranded nucleic acid comprising 20 thymines (T20) (SEQ ID NO: 126)), and a biotin functionality. In FIG. 195B (e.g., rep194), the reporter comprises an enzyme (e.g., an HRP enzyme), a nucleic acid-based linker (e.g., a single-stranded nucleic acid comprising 12 thymines (T12 (SEQ ID NO: 127)) each on either side of a cleavable section comprising 5 uracils), a carbon spacer, and a biotin functionality. In FIG. 195C (e.g., rep188), the reporter comprises an enzyme (e.g., an HRP enzyme), a nucleic acid-based linker (e.g., a single-stranded nucleic acid comprising 20 thymines (T20) (SEQ ID NO: 126)), and an acrydite functionality. In FIG. 195D (e.g., rep190), the reporter comprises an enzyme (e.g., an HRP enzyme), a nucleic acid-based linker (e.g., a single-stranded nucleic acid comprising 20 thymines (SEQ ID NO: 126)), a carbon spacer, and an amine functionality. In FIG. 195E (e.g., rep197), the reporter comprises an enzyme (e.g., a poly-HRP enzyme), a first carbon spacer, a nucleic acid-based linker (e.g., a single-stranded nucleic acid comprising 20 thymines (T20) (SEQ ID NO: 126)), a second carbon spacer, and an amine functionality. In FIG. 195E (e.g., rep197), a poly-HRP detection moiety (e.g., streptavidin (SA) molecule functionalized with multiple HRP groups) is conjugated to the nucleic acid linker via a biotin and the first carbon spacer. In at least some instances, the incorporation of multiple enzymes on one reporter may provide an assay signal boost upon a single cleavage event of the reporter induced by the activated programmable nuclease. In some embodiments, a linker comprises at least one linker segment, the functionality for immobilization to a surface, or a combination thereof. In some embodiments, the linker is referred to as a tether.

[0224] FIG. 196 shows a schematic of a reporter immobilized to a surface of a carboxylic acid magnetic bead (MB) via an amide bond. The depicted reporter comprises a poly-HRP reporter and may be substantially similar to the reporter shown in FIG. 195E.

[0225] FIGS. 197A-197E show a schematic (FIG. 197A) and results for experiments designed to study effects of reporter concentration (FIGS. 197B-197D) and to determine the limit of detection (FIG. 197E) of a programmable nuclease-based detection assay using reporters comprising HRP-based detection moieties (rep194) which were immobilized on streptavidin beads.

[0226] FIGS. 198A-198E show results for an experiment designed to study the effect of different concentrations of reporter functionalized to a plate (FIGS. 198A-198C and 198E) and to determine the limit of detection (FIG. 198D) of a programmable nuclease-based detection assay using reporters comprising HRP-based detection moieties (rep194) immobilized on a plate.

[0227] FIGS. 199A-199F show the results of a programmable nuclease-based detection assay utilizing hydrogels of different PEG-DA concentrations (20% or 35%) co-polymerized with different concentrations (10 uM or 1 uM) of reporters comprising HRP-based detection moieties and acrydite functionalities (rep188), where the hydrogels act as a solid support for the reporter comprising HRP signal enhancement enzymes.

[0228] FIGS. 200A-200F show a schematic (FIG. 200A) and results (FIGS. 200B-200F) of a programmable nuclease-based detection assay utilizing NHS-activated resin as the solid support for a reporter comprising an HRP signal enhancement enzyme (rep190).

[0229] FIGS. 201A-201D show results of a programmable nuclease-based detection assay using a poly-HRP reporter immobilized carboxylic beads as shown in FIG. 196. The bead volume and target concentration were varied to determine a limit of detection (LOD).

[0230] FIG. 202 shows a schematic of a signal amplification strategy involving downstream activation of an endonuclease following activation of a programmable nuclease in response to a target nucleic acid. Presence of the target nucleic acid may activate the programmable nuclease, which may cleave the first nucleic acid section of the first reporter from the second nucleic acid section of the first reporter, thereby freeing the first nucleic acid section to bind to and activate the endonuclease. The activated endonuclease may then cleave the second reporter and release a detection moiety that may be detected as described herein.

[0231] FIG. 203 shows illustrative structures for first reporters comprising first and second nucleic acid sections in accordance with some embodiments, such as the strategy illustrated in FIG. 202.

[0232] FIG. 204 shows a schematic of a signal amplification strategy involving reporters comprising an enzyme conjugated to a linker, in which the linker comprises a functionality for immobilization to a support. Presence of a target nucleic acid may activate the programmable nuclease, which may cleave a nucleic acid tether to separate the enzyme from the functionality for immobilization. The solution is then contacted with beads that bind the functionality for immobilization. Enzymes cleaved from the nucleic acid tether remain free, whereas in the absence of cleavage, enzymes become complexed with the beads. The solution is separated from the beads and tested for enzyme activity in the presence of enzyme substrate to create a detectable and amplified signal indicative of the presence of the target nucleic acid.

[0233] FIG. 205 shows illustrative results for assays with different reporter concentrations. Error bands indicate 1 standard deviation (n=3).

[0234] FIG. 206 shows illustrative results for assays with different beads and binding buffers. Error bands indicate 1 standard deviation (n=3).

[0235] FIG. 207 shows illustrative results for assays with reporters having tethers of different lengths. DNase is shown as a control for maximal activity of each reporter. Error bands indicate 1 standard deviation (n=3).

[0236] FIG. 208 shows illustrative results for assays with different reporter concentrations and bead volumes. Error bands indicate 1 standard deviation (n=3).

[0237] FIG. 209 shows illustrative results for a study of assay sensitivity for various concentrations of target. Error bands indicate 1 standard deviation (n=22). OTC indicates off-target control.

[0238] FIG. 210 shows a schematic representation of a process for concentrating enzymes released from a reporter (e.g., HRP) in an assay.

[0239] FIG. 211 shows illustrative results for the effects of concentrating enzymes released from a reporter in an assay. Error bands indicate 1 standard deviation (n=3).

[0240] FIG. 212 shows illustrative results for the effects of adding enzyme substrate serially following concentration of the enzyme on a substrate resin.

[0241] FIG. 213 shows illustrative results measured by raw fluorescence signal over reaction time for the effects of running a NucC enzyme activity assay at elevated temperatures with and without activator present during the reaction.

[0242] FIG. 214 shows a schematic representation of a surface-immobilized positive-feedback system.

[0243] FIG. 215 shows a schematic representation of a surface-immobilized positive-feedback system wherein the Cas #1 is initially in the solution and Cas #2 is initially immobilized. In a subsequent step, Cas #1 forms an activated complex upon binding to a first target nucleic acid and cleaves the ssDNA tether linking Cas #2 to the surface. The released Cas #2 is activated upon complexing with a second target nucleic acid (immobilized target #2), and the activated Cas #2 is effective to release additional immobilized Cas #2 and to cleave the reporter to produce a detectable product.

[0244] FIG. 216 shows graphical representations of the data output of a surface-immobilized positive feedback system assay using two programmable nucleases with one initially immobilized on a surface.

[0245] FIG. 217 shows a schematic representation of tethered guide-reporter chimera hybrid molecules with HRP wherein the tethered guide-reporter hybrid molecule is anchored on a surface with a carbon spacer connecting the programmable nuclease to the surface, and then a subsequent carbon spacer connecting the programmable nuclease to the reporter DNA, followed by a final carbon spacer linking the target DNA to HRP.

[0246] FIG. 218 shows illustrative results measured by raw fluorescence signal over reaction time for the effects of running Cas enzyme variants (Cas12 variants of SEQ ID NO: 17 or 34, or variants designated as a Cas12 variant having SEQ ID NO: 120, and a Cas12 variant having SEQ ID NO: 116) in a NEAR buffer conditions using Cas complexing and DETECTR.

[0247] FIG. 219 shows illustrative results measured by raw fluorescence signal over reaction time for the effects of running Cas variants (Cas of SEQ ID NO: 34, and a Cas12 variant having SEQ ID NO: 116) when added to a NEAR reaction mix.

[0248] FIG. 220 shows illustrative results measured by raw fluorescence signal over reaction time comparing a two-step NEAR reaction in the presence of guide alone (no template control, NTC) and presence of a template.

[0249] FIG. 221A-221B shows illustrative results measured by raw fluorescence signal over reaction time for primer screens of illustrative target sites R8895 (in influenza B virus (IBV)) (FIG. 221A) and R288 (in RSV-A) (FIG. 221B). Two-digit numbers along the top and right of the collections of graphs identify primers in the respective reactions. The sequences and locations of these primers are illustrated in FIGS. 222A-222B.

[0250] FIGS. 222A-222B shows a diagram depicting single base pair shifts of primers in an illustrative optimization of guide overlap for R8895 (FIG. 222A) and R288 (FIG. 222B). FIG. 222A discloses SEQ ID NOS 1533-1541, respectively, in order of appearance. FIG. 222B discloses SEQ ID NOS 1542-1545, 1487-1489 and 1450-1451, respectively, in order of appearance.

[0251] FIG. 223 shows illustrative results measured by raw fluorescence signal over reaction time for a NEAR reaction with three selected primer pairs of 25 with 24, 25 with 26, and 31 with 36 (referring to primers as numbered in FIG. 222A-222B).

[0252] FIG. 224 shows illustrative results measured by raw fluorescence signal over reaction time for a NEAR reaction with primer set 25-26 for the effect of TIPP on the reaction.

[0253] FIG. 225 shows illustrative results measured by raw fluorescence signal over reaction time for testing Savinase for RNAse activity.

[0254] FIG. 226 shows illustrative results measured by raw fluorescence signal over reaction time for testing Savinase for RNAse activity in combination with Savinase inhibitor phenylmethylsulfonyl fluoride (PMSF).

[0255] FIG. 227 shows illustrative results measured by raw fluorescence signal over reaction time for testing protease inhibitors for activity against CasM.26.

[0256] FIGS. 228A-228D show illustrative results measured by raw fluorescence signal over reaction time for testing Savinase under different conditions for protease activity.

[0257] FIGS. 229A-229D show illustrative results measured by raw fluorescence signal over reaction time for testing Savinase under different conditions for testing remaining RNAse activity.

[0258] FIGS. 230A-230B show illustrative results measured by raw fluorescence signal over time for the effects of running a NucC enzyme activity assay with and without various concentrations of linear activator present during the reaction.

### DETAILED DESCRIPTION

[0259] The present disclosure provides systems and methods for nucleic acid target detection. The systems and methods of the present disclosure can be implemented using devices that are configured for programmable nuclease-based detection. In some embodiments, the devices can be configured for single reaction detection. In some embodiments, the devices can be disposable devices. The devices disclosed herein can be particularly well suited for carrying out highly efficient, rapid, and accurate reactions for detecting whether a target is present in a sample. The target can comprise a target sequence or target nucleic acid. As used herein, a target can be referred to interchangeably as a target nucleic acid. Further, a target can be referred to as a target amplicon or a target nucleic acid amplicon if such target undergoes amplification (e.g., through a thermocycling process as described elsewhere herein). The target nucleic acid can be a portion of a nucleic acid of interest, e.g., a target nucleic acid from any plant, animal, virus, or microbe of interest. The devices provided herein can be used to perform rapid tests in a single integrated system.

[0260] The target nucleic acid can be a nucleic acid or a portion of a nucleic acid from a pathogen, virus, bacterium, fungi, protozoa, worm, or other agent(s) or organism(s) responsible for and/or related to a disease or condition in living organisms (e.g., humans, animals, plants, crops, and the like). The target nucleic acid can be a nucleic acid, or a portion thereof. The target nucleic acid can be a portion of a nucleic acid from a gene expressed in a cancer or genetic disorder in the sample. The target nucleic acid can be a portion of an RNA or DNA from any organism in the sample. In some embodiments, one or more programmable nucleases as disclosed herein can be activated to initiate trans cleavage activity of a reporter (also referred to herein as a reporter molecule). A programmable nuclease as disclosed herein can, in some cases, bind to a target sequence or target nucleic acid to initiate trans cleavage of a reporter. The programmable nuclease can be referred to as an RNA-activated programmable RNA nuclease. In some instances, the programmable nuclease as disclosed herein can bind to a target DNA to initiate trans cleavage of an RNA reporter. Such a programmable nuclease can be referred to herein as a DNA-activated programmable RNA nuclease. In some cases, a programmable nuclease as described herein can be activated by a target RNA or a target DNA. For example, a programmable nuclease, e.g., a Cas enzyme, can be activated by a target RNA nucleic acid or a target DNA nucleic acid to cleave RNA reporters. In some embodiments, the Cas enzyme can bind to a target ssDNA which initiates trans cleavage of RNA reporters. In some instances, a programmable nuclease as disclosed herein can bind to a target DNA to initiate trans cleavage of a DNA reporter, and this programmable nuclease can be referred to as a DNA-activated programmable DNA nuclease.

[0261] The nucleic acids described and referred to herein can comprise a plurality of base pairs. A base pair can be a biological unit comprising two nucleobases bound to each other by hydrogen bonds. Nucleobases can comprise adenine, guanine, cytosine, thymine, and/or uracil. In some cases, the nucleic acids described and referred to herein can comprise different base pairs. In some cases, the nucleic acids described and referred to herein can comprise one or more modified base pairs. The one or more modified base pairs can be produced when one or more base pairs undergo a chemical modification leading to new bases. The one or more modified base pairs can be, for example, Hypoxanthine, Inosine, Xanthine, Xanthosine, 7-Methylguanine, 7-Methylguanosine, 5,6-Dihydrouracil, Dihydrouridine, 5-Methylcytosine, 5-Methylcytidine, 5-hydroxymethylcytosine (5 hmC), 5-formylcytosine (5fC), or 5-carboxylcytosine (5caC).

[0262] The programmable nuclease can become activated after binding of a guide nucleic acid that is complexed with the programmable nuclease with a target nucleic acid, and the activated programmable nuclease can cleave the target nucleic acid, which can result in a trans cleavage activity. Trans cleavage activity can be non-specific cleavage of nearby single-stranded nucleic acids by the activated programmable nuclease, such as trans cleavage of detector nucleic acids with a detection moiety. Once the target nucleic acid is cleaved by the activated programmable nuclease, the detection moiety can be released or separated from the reporter and can directly or indirectly generate a detectable signal. The reporter and/or the detection moiety can be immobilized on a support medium. Often the detection moiety is at least one of a fluorophore, a dye, a polypeptide, or a nucleic acid. Sometimes the detection moiety binds to a capture molecule on the support medium to be immobilized. The detectable signal can be visualized on the support medium to assess the presence or concentration of one or more target nucleic acids associated with an ailment, such as a disease, cancer, or genetic disorder.

[0263] The systems and methods of the present disclosure can be implemented using a device that is compatible with any type of programmable nuclease that is human-engineered or naturally occurring. The programmable nuclease can comprise a nuclease that is capable of being activated when complexed with a guide nucleic acid and a target nucleic acid segment or a portion thereof. A programmable nuclease can become activated when complexed with a guide nucleic acid and a target sequence of a target gene of interest. The programmable nuclease can be activated upon binding of a guide nucleic acid to a target nucleic acid and can exhibit or enable trans cleavage activity once activated. In any instances or embodiments where a CRISPR-based programmable nuclease is described or used, it is recognized herein that any other type of programmable nuclease can be used in addition to or in substitution of such CRISPR-based programmable nuclease.

[0264] The systems and methods of the present disclosure can be implemented using a device that is compatible with a plurality of programmable nucleases. The device can comprise a plurality of programmable nuclease probes comprising the plurality of programmable nucleases and one or more corresponding guide nucleic acids. The plurality of programmable nuclease probes can be the same. Alternatively, the plurality of programmable nuclease probes can be different. For example, the plurality of programmable nuclease probes can comprise different programmable nucleases and/or different guide nucleic acids associated with the programmable nucleases.

[0265] As used herein, a programmable nuclease generally refers to any enzyme that can cleave nucleic acid. The programmable nuclease can be any enzyme that can be or has been designed, modified, or engineered by human contribution so that the enzyme targets or cleaves the nucleic acid in a sequence-specific manner. Programmable nucleases can include, for example, zinc-finger nucleases (ZFNs), transcription activator-like effector nucleases (TALENs), and/or RNA-guided nucleases such as the bacterial clustered regularly interspaced short palindromic repeat (CRISPR)-Cas (CRISPR-associated) nucleases or Cpf1. Programmable nucleases can also include, for example, PfAgo and/or NgAgo.

[0266] ZFNs can cut genetic material in a sequence-specific matter and can be designed, or programmed, to target specific viral targets. A ZFN is composed of two domains: a DNA-binding zinc-finger protein linked to the Fokl nuclease domain. The DNA-binding zinc-finger protein is fused with the non-specific Fokl cleave domain to create ZFNs. The protein will typically dimerize for activity. Two ZFN monomers form an active nuclease; each monomer binds to adjacent half-sites on the target. The sequence specificity of ZFNs is determined by ZFPs. Each zinc-finger recognizes a 3-bp DNA sequence, and 3-6 zinc-fingers are used to generate a single ZFN subunit that binds to DNA sequences of 9-18 bp. The DNA-binding specificities of zinc-fingers is altered by mutagenesis. New ZFPs are programmed by modular assembly of pre-characterized zinc fingers.

[0267] Transcription activator-like effector nucleases (TALENs) can cut genetic material in a sequence-specific matter and can be designed, or programmed, to target specific viral targets. TALENs contain the Fokl nuclease domain at their carboxyl termini and a class of DNA binding domains known as transcription activator-like effectors (TALEs). TALENs are composed of tandem arrays of 33-35 amino acid repeats, each of which recognizes a single base-pair in the major groove of target viral DNA. The nucleotide specificity of a domain comes from the two amino acids at positions 12 and 13 where Asn-Asn, Asn-Ile, His-Asp and Asn-Gly recognize guanine, adenine, cytosine and thymine, respectively. That pattern allows one to program TALENs to target various nucleic acids.

[0268] The programmable nuclease can comprise any type of human engineered enzymes. Alternatively, the programmable nuclease can comprise CRISPR enzymes derived from naturally occurring bacteria or phage. A programmable nuclease can be a Cas protein (also referred to, interchangeably, as a Cas nuclease). A crRNA and Cas protein can form a CRISPR enzyme. The programmable nuclease can be a CRISPR-Cas (clustered regularly interspaced short palindromic repeats-CRISPR associated) nucleoprotein complex with trans cleavage activity, which can be activated by binding of a guide nucleic acid with a target nucleic acid. The programmable nuclease can comprise one or more amino acid modifications. The programmable nuclease be a nuclease derived from a CRISPR-Cas system. The programmable nuclease can be a nuclease derived from recombineering.

### Programmable Nucleases

[0269] Disclosed herein are programmable nucleases and uses thereof, e.g., detection and editing of target nucleic acids. In some instances, programmable nucleases comprise a Type V CRISPR/Cas protein. In some instances, Type V CRISPR/Cas proteins comprise nucleic acid cleavage activity. In some instances, Type V CRISPR/Cas proteins cleave or nick single-stranded nucleic acids, double, stranded nucleic acids, or a combination thereof. In some cases, Type V CRISPR/Cas proteins cleave single-stranded nucleic acids. In some cases, Type V CRISPR/Cas proteins cleave double-stranded nucleic acids. In some cases, Type V CRISPR/Cas proteins nick double-stranded nucleic acids. Typically, guide RNAs of Type V CRISPR/Cas proteins hybridize to ssDNA or dsDNA. However, the trans cleavage activity of Type V CRISPR/Cas protein is typically directed towards ssDNA. In some cases, the Type V CRISPR/Cas protein comprises a catalytically inactive nuclease domain. In some cases, the Type V CRISPR/Cas protein comprises a catalytically inactive nuclease domain. A catalytically inactive domain of a Type V CRISPR/Cas protein may comprise at least 1, at least 2, at least 3, at least 4, or at least 5 mutations relative to a wild type nuclease domain of the Type V CRISPR/Cas protein. Said mutations may be present within a cleaving or active site of the nuclease. The Type V CRISPR/Cas protein may be a Cas14 protein. The Cas 14 protein may be a Cas14a. 1 protein. The Cas14a. 1 protein may be represented by SEQ ID NO: 3, presented in Table 1. The Cas14 protein may comprise an amino acid sequence that is at least 70%, at least 75%, at least 80%, at least 85%, at least 90%, at least 95%, at least 98%, at least 99%, or 100% identical to SEQ ID NO: 3. The Cas14 protein may consist of an amino acid sequence that is at least 70%, at least 75%, at least 80%, at least 85%, at least 90%, at least 95%, at least 98%, at least 99%, or 100% identical to SEQ ID NO: 3. The Cas14 protein may comprise at least about 50, at least about 100, at least about 150, at least about 200, at least about 250, at least about 300, at least about 350, at least about 400, at least about 450, at least about 500 consecutive amino acids of SEQ ID NO: 3.

[0270] Table 1 provides illustrative amino acid sequences of programmable nucleases having trans-cleavage activity. In some instances, programmable nucleases described herein comprise an amino acid sequence that is at least 65%, at least 70%, at least 75%, at least 80%, at least 85%, at least 90%, at least 95%, at least 97%, or at least 98%, at least 99%, or 100% identical to any one of SEQ ID Nos: 1-34 or 87-125. The programmable nuclease may consist of an amino acid sequence that is at least 65%, at least 70%, at least 75%, at least 80%, at least 85%, at least 90%, at least 95%, at least 98%, at least 99%, or 100% identical to any one or SEQ ID Nos: 1-34 or 87-125. The programmable nuclease may comprise at least about 50, at least about 100, at least about 150, at least about 200, at least about 250, at least about 300, at least about 350, at least about 400, at least about 450, at least about 500 consecutive amino acids of any one of SEQ ID NOs: 1-34 or 87-125.

TABLE 1
Example Protein Sequences

| SEQ ID | SEQUENCE |
|---|---|
| SEQ ID NO: | MADLSQFTHKYQVPKTLRFELIPQGKTLENLSAYGMVADDKQRSENYK |
| 1 | KLKPVIDRIYKYFIEESLKNTNLDWNPLYEAIREYRKEKTTATITNLKEQQ |
| | DICRRAIASRFEGKVPDKGDKSVKDFNKKQSKLFKELFGKELFTDSVLEQ |
| | LPGVSLSDEDKALLKSFDKFTTYFVGFYDNRKNVFSSDDISTGIPHRLVQ |
| | ENFPKFIDNCDDYKRLVLVAPELKEKLEKAAEATKIFEDVSLDEIFSIKFY |
| | NRLLQQNQIDQFNQLLGGIAGAPGTPKIQGLNETLNLSMQQDKTLEQKL |
| | KSVPHRFSPLYKQILSDRSSLSFIPESFSCDAEVLLAVQEYLDNLKTEHVIE |
| | DLKEVFNRLTTLDLKHIYVNSTKVTAFSQALFGDWNLCREQLRVYKMS |
| | NGNEKITKKALGELESWLKNSDIAFTELQEALADEALPAKVNLKVQEAIS |
| | GLNEQMAKSLPKELKIPEEKEELKALLDAIQEVYHTLEWFIVSDDVETDT |
| | DFYVPLKETLQIIQPIIPLYNKVRNFATQKPYSVEKFKLNFANPTLADGW |
| | DENKEQQNCAVLFQKGNNYYLGILNPKNKPDFDNVDTEKQGNCYQKM |
| | VYKQFPDFSKMMPKCTTQLKEVKQHFEGKDSDYILNNKNFIKPLTITREV |
| | YDLNNVLYDGKKKFQIDYLRKTKDEDGYYTALHTWIDFAKKFVASYKS |
| | TSIYDTSTILPPEKYEKLNEFYGALDNLFYQIKFENIPEEIIDTYVEDGKLFL |
| | FQIYNKDFAAGATGAPNLHTIYWKAVFDPENVKDVVVKLNGQAELFYR |
| | PKSNMDVIRHKVGEKLVNRTLKDGSILTDELHKELYLYANGSLKKGLSE |
| | DAKIILDKNLAVIYDVHHEIVKDRRFTTDKFFFHVPLTLNYKCDKNPVKF |
| | NAEVQEYLKENPDTYVIGIDRGERNLIYAVVIDPKGRIVEQKSFNVINGF |
| | DYHGKLDQREKERVKARQAWTAVGKIKELKQGYLSLVVHEISKMMVR |
| | YQAVVVLENLNVGFKRVRSGIAEKAVYQQFEKMLINKLNYLMFKDAGG |
| | TEPGSVLNAYQLTDRFESFAKMGLQTGFLFYIPAAFTSKIDPATGFVDPFR |
| | WGAIKTLADKREFLSGFESLKFDSTTGNFILHFDVSKNKNFQKKLEGFVP |
| | DWDIIIEANKMKTGKGATYIAGKRIEFVRDNNSQGHYEDYLPCNALAET |
| | LRQCDIPYEEGKDILPLILEKNDSKLLHSVFKVVRLTLQMRNSNAETGED |
| | YISSPVEDVSGSCFDSRMENEKLPKDADANGAYHIALKGMLALERLRKD |
| | EKMAISNNDWLNYIQEKRA* |
| SEQ ID NO: | MAGKKKDKDVINKTLSVRIIRPRYSDDIEKEISDEKAKRKQDGKTGELDR |
| 2 | AFFSELKSRNPDIITNDELFPLFTEIQKNLTEIYNKSISLLYMKLIVEEEGGS |
| | TASALSAGPYKECKARFNSYISLGLRQKIQSNFRRKELKGFQVSLPTAKS |
| | DRFPIPFCHQVENGKGGFKVYETGDDFIFEVPLIKYTATNKKSTSGKNYT |
| | KVQLNNPPVPMNVPLLLSTMRRRQTKKGMQWNKDEGTNAELRRVMSG |
| | EYKVSYAEIIRRTRFGKHDDWFVNFSIKFKNKTDELNQNVRGGIDIGVSN |
| | PLVCAVTNGLDRYIVANNDIMAFNERAMARRRTLLRKNRFKRSGHGAK |
| | NKLEPITVLTEKNERFRKSILQRWAREVAEFFKRTSASVVNMEDLSGITE |
| | REDFFSTKLRTTWNYRLMQTTIENKLKEYGIAVNYISPKYTSQTCHSCGK |
| | RNDYFTFSYRSENNYPPFECKECNKVKCNADFNAAKNIALKVVL |
| SEQ ID NO: | MAKNTITKTLKLRIVRPYNSAEVEKIVADEKNNREKIALEKNKDKVKEA |
| 3 | CSKHLKVAAYCTTQVERNACLFCKARKLDDKFYQKLRGQFPDAVFWQ |
| | EISEIFRQLQKQAAEIYNQSLIELYYEIFIKGKGIANASSVEHYLSDVCYTR |
| | AAELFKNAAIASGLRSKIKSNFRLKELKNMKSGLPTTKSDNFPIPLVKQK |
| | GGQYTGFEISNHNSDFIIKIPFGRWQVKKEIDKYRPWEKFDFEQVQKSPK |
| | PISLLLSTQRRKRNKGWSKDEGTEAEIKKVMNGDYQTSYIEVKRGSKIGE |
| | KSAWMLNLSIDVPKIDKGVDPSIIGGIDVGVKSPLVCAINNAFSRYSISDN |
| | DLFHFNKKMFARRRILLKKNRHKRAGHGAKNKLKPITILTEKSERFRKK |
| | LIERWACEIADFFIKNKVGTVQMENLESMKRKEDSYFNIRLRGFWPYAE |
| | MQNKIEFKLKQYGIEIRKVAPNNTSKTCSKCGHLNNYFNFEYRKKNKFP |
| | HFKCEKCNFKENADYNAALNISNPKLKSTKEEP |
| SEQ ID NO: | MATLVSFTKQYQVQKTLRFELIPQGKTQANIDAKGFINDDLKRDENYMK |
| 4 | VKGVIDELHKNFIEQTLVNVDYDWRSLATAIKNYRKDRSDTNKKNLEKT |
| | QEAARKEIIAWFEGKRGNSAFKNNQKSFYGKLFKKELFSEILRSDDLEYD |
| | EETQDAIACFDKFTTYFVGFHENRKNMYSTEAKSTSVAYRVVNENFSKF |
| | LSNCEAFSVLEAVCPNVLVEAEQELHLHKAFSDLKLSDVFKVEAYNKYL |
| | SQTGIDYYNQIIGGISSAEGVRKIRGVNEVVNNAIQQNDELKVALRNKQF |
| | TMVQLFKQILSDRSTLSFVSEQFTSDQEVITVVKQFNDDIVNNKVLAVVK |
| | TLFENFNSYDLEKIYINSKELASVSNALLKDWSKIRNAVLENKIIELGANP |
| | PKTKISAVEKEVKNKDFSIAELASYNDKYLDKEGNDKEICSIANVVLEAV |
| | GALEIMLAESLPADLKTLENKNKVKGILDAYENLLHLLNYFKVSAVNDV |
| | DLAFYGAFEKVYVDISGVMPLYNKVRNYATKKPYSVEKFKLNFAMPTL |
| | ADGWDKNKERDNGSIILLKDGQYYLGVMNPQNKPVIDNAVCNDAKGY |
| | QKMVYKMFPEISKMVTKCSTQLNAVKAHFEDNTNDFVLDDTDKFISDL |
| | TITKEIYDLNNVLYDGKKKFQIDYLRNTGDFAGYHKALETWIDFVKEFLS |
| | KYRSTAIYDLTTLLPTNYYEKLDVFYSDVNNLCYKIDYENISVEQVNEW |
| | VEEGNLYLFKIYNKDFATGSTGKPNLHTMYWNAVFAEENLHDVVVKLN |
| | GGAELFYRPKSNMPKVEHRVGEKLVNRKNVNGEPIADSVHKEIYAYAN |
| | GKISKSELSENAQEELPLAIIKDVKHNITKDKRYLSDKYFFHVPITLNYKA |
| | NGNPSAFNTKVQAFLKNNPDVNIIGIDRGERNLLYVVVIDQQGNIIDKKQ |
| | VSYNKVNGYDYYEKLNQREKERIEARQSWGAVGKIKELKEGYLSLVVR |
| | EIADMMVKYNAIVVMENLNAGFKRVRGGIAEKAVYQKFEKMLIDKLNY |
| | LVFKDVEAKEAGGVLNAYQLTDKFDSFEKMGNQSGFLFYVPAAYTSKI |
| | DPVTGFANVFSTKHITNTEAKKEFICSFNSLRYDEAKDKFVLECDLNKFK |
| | IVANSHIKNWKFIIGGKRIVYNSKNKTYMEKYPCEDLKATLNASGIDFSS |
| | SEIINLLKNVPANREYGKLFDETYWAIMNTLQMRNSNALTGEDYIISAVA |
| | DDNEKVFDSRTCGAELPKDADANGAYHIALKGLYLLQRIDISEEGEKVD |
| | LSIKNEEWFKFVQQKEYAR* |
| SEQ ID NO: | MCMKITKIDGISHKKYKEKGKLIKNNDTAKDIIEERFNDIEKKTKELFQK |
| 5 | TLDFYVKNYEKCKEQNKERREKAKNYFSKVKILVDNKKITICNENTEKM |
| | EIEDFNEYDVRSGKYFNVLNKILNGENYTEEDLEVFENDLQKRTGRIKSI |
| | KNSLEENKAHFKKESINNNIIYDRVKGNNKKSLFYEYYRISSKHQEYVNN |
| | IFEAFDKLYSNSHEAMNNLFSEITKDSKDRNIRKIREAYHEILNKNKTEFG |
| | EELYKKIQDNRNNFDKLLEIEPEIKELTKSQIFYKYYIDKVNLDETSIKHCF |
| | CHLVEIEVNQLLKNYVYSKRNINKEKLENIFEYCKLKNLIKNKLVNKLN |
| | NYIRNCGKYNAYISNNDVVVNSEKISEIRTKEAFLRSIIGVSSSAYFSLRNI |
| | LNTDNTQDITNKVDKEVDKLYQENKKIELEERLKLFFGNYFDINNQQEIK |
| | VFLMNIDKIISSIRHEIIHFKMETNAQNIFDFNNVNLGNTAKNIFSNEINEE |
| | KIKFKIFKQLNSANVFDYLSNKDITEYMDKVVFSFTNRNVSFVPSFTKIYN |
| | RVQDLANSLEIKKWKIPDKSEGKDAQIYLLKNIYYGKFLDEFLNEENGIFI |
| | SIKDKIIELNRNQNKRTGFYKLEKFEKIEETNPKKYLEIIQSLYMINIEEIDS |
| | EGKNIFLDFIQKIFLKGFFEFIKNNYNYLLELKKIQDKKNIFDSEMSEYIAG |
| | EKTLEDIGEINEIIQDIKITEIDKILNQTDKINCFYLLLKLLNYKEITELKGN |
| | LEKYQILSKTNVYEKELMLLNIVNLDNNKVKIENFKILAEEIGKFIEKINIE |
| | EINKNKKIKTFEELRNFEKGENTGEYYNIYSDDKNIKNIRNLYNIKKYGM |
| | LDLLEKISEKTNYCIKKKDLEEYSELRKQLEDEKTNFYKIQEYLHSKYQQ |
| | KPKKILLKNNKNDYEKYKKSIENIEKYVHLKNKIEFNELNLLQSLLLKILH |
| | RLVGFTSIWERDLRFRLIGEFPDELDVEDIFDHRKRYKGTGKGICKKYDR |
| | FINTHTEYKNNNKMENVKFADNNPVRNYIAHFNYLPNPKYSILKMMEK |
| | LRKLLDYDRKLKNAVMKSIKDILEEYGFKAEFIINSDKEIILNLVKSVEIIH |
| | LGKEDLKSRRNSEDLCKLVKAMLEYSK* |
| SEQ ID NO: | MEDKQFLERYKEFIGLNSLSKTLRNSLIPVGSTLKHIQEYGILEEDSLRAQ |
| 6 | KREELKGIMDDYYRNYIEMHLRDVHDIDWNELFEALTEVKKNQTDDAK |
| | KRLEKIQEKKRKEIYQYLSDDAVFSEMFKEKMISGILPDFIRCNEGYSEEE |
| | KEEKLKTVALFHRFTSSFNDFFLNRKNVFTKEAIVTAIGYRVVHENAEIFL |
| | ENMVAFQNIQKSAESQISIIERKNEHYFMEWKLSHIFTADYYMMLMTQK |
| | AIEHYNEMCGVVNQQMREYCQKEKKNWNLYRMKRLHKQILSNASTSF |
| | KIPEKYENDAEVYESVNSFLQNVMEKTVMERIAVLKNSTDNFDLSKIYIT |
| | APYYEKISNYLCGSWNTITDCLTHYYEQQIAGKGARKDQKVKAAVKAD |
| | KWKSLSEIEQLLKEYARAEEVKRKPEEYIAEIENIVSLKEAHLLEYHPEVN |
| | LIENEKYATEIKDVLDNYMELFHWMKWFYIEEAVEKEVNFYGELDDLY |
| | EEIKDIVPLYNKVRNYVTQKPYSDTKIKLNFGTPTLANGWSKSKEYDYN |
| | AILLQKDGKYYMGIFNPIQKPEKEIIEGHSQPLEGNEYKKMVYYYLPSAN |
| | KMLPKVLLSKKGMEIYQPSEYIINGYKERRHIKSEEKFDLQFCHDLIDYF |
| | KSGIERNSDWKVFGFDFSDTDTYQDISGFYREVEDQGYKIDWTYIKEADI |
| | DRLNEEGKLYLFQIYNKDFSEKSTGRENLHTMYLKNLFSEENVREQVLK |
| | LNGEAEIFFRKSSVKKPIIHKKGTMLVNRTYMEEVNGNSVRRNIPEKEYQ |
| | EIYNYKNHRLKGELSTEAKKYLEKAVCHETKKDIVKDYRYSVDKFFIHL |
| | PITINYRASGKETLNSVAQRYIAHQNDMHVIGIDRGERNLIYVSVINMQG |
| | EIKEQKSFNIINEFNYKEKLKEREQSRGAARRNWKEIGQIKDLKEGYLSG |
| | VIHEIAKMMIKYHAIIAMEDLNYGFKRGRFKVERQVYQKFENMLIQKLN |
| | YLVFKDRPADEDGGVLRGYQLAYIPDSVKKMGRQCGMIFYVPAAFTSKI |
| | DPTTGFVDIFKHKVYTTEQAKREFILSFDEICYDVERQLFRFTFDYANFVT |
| | QNVTLARNNWTIYTNGTRAQKEFGNGRMRDKEDYNPKDKMVELLESE |
| | GIEFKSGKNLLPALKKVSNAKVFEELQKIVRFTVQLRNSKSEENDVDYD |
| | HVISPVLNEEGNFFDSSKYKNKEEKKESLLPVDADANGAYCIALKGLYI |
| | MQAIQKNWSEEKALSPDVLRLNNNDWFDYIQNKRYR* |
| SEQ ID NO: | MEEKKMSKIEKFIGKYKISKTLRFRAVPVGKTQDNIEKKGILEKDKKRSE |
| 7 | DYEKVKAYLDSLHRDFIENTLKKVKLNELNEYACLFFSGTKDDGDKKK |
| | MEKLEEKMRKTISNEFCNDEMYKKIFSEKILSENNEEDVSDIVSSYKGFFT |
| | SLNGYVNNRKNLYVSDAKPTSIAYRCINENLPKFLRNVECYKKVVQVIP |
| | KEQIEYMSNNLNLSPYRIEDCFNIDFFEFCLSQGGIDLYNTFIGGYSKKDG |
| | TKVQGINEIVNLYNQKNKKDKEKYKLPQFTPLFKQILSDRDTKSFSIEKLE |
| | NIYEVVELVKKSYSDEMFDDIETVFSNLNYYDASGIYVKNGPAITHISMN |
| | LTKDWATIRNNWNYEYDEKHSTKKNKNIEKYEDTRNTMYKKIDSFTLE |
| | YISRLVGKDIDELVKYFENEVANFVMDIKKTYSKLTPLFDRCQKENFDIS |
| | EDEVNDIKGYLDNVKLLESFMKSFTINGKENNIDYVFYGKFTDDYDKLH |
| | EFDHIYNKVRNYITTSRKPYKLDKYKLYFDNPQLLGGWDINKEKDYRTV |
| | MLTKDGKYYFAIIDKGEHPFDNIPKDYFDNNGYYKKIIYRQIPNAAKYLS |
| | SKQIVPQNPPEEVKRILDKKKADSKSLTEEEKNIFIDYIKSDFLKNYKLLF |
| | DKNNNPYFNFAFRESSTYESLNEFFEDVERQAYSVRYENLPADYIDNLV |
| | NEGKIYLFEIYSKDFSEYSKGTNNLHTMYFKALFDNDNLKNTVFKLSGN |
| | AELFIRPASIKKDELVIHPKNQLLQNKNPLNPKKQSIFDYDLVKDKRFFEN |
| | QYMLHISIEINKNERDAKKIKNINEMVRKELKDSDDNYIIGIDRGERNLLY |
| | VCVINSAGKIVEQMSLNEIINEYNGIKHTVDYQGLLDKCEKERNAQRQS |
| | WKSIENIKELKDGYISQVVHKLCQLVEKYDAIIAMENLNGGFKRGRTKF |
| | EKQVYQKFENKLINKMEYMADKKRKTTENGGILRGYQLTNGCINNSYQ |
| | NGFIFYVPAWLTSKIDPTTGFVDLLKPKYTNVEEAHLWINKFNSITYDKK |
| | LDMFAFNINYSQFPRADIDYRKIWTFYTNGYRIETFRNSEKNNEFDWKEV |
| | HLTSVIKKLLEEYQINYISGKNIIDDLIQIKDKPFWNSFIKYIRLTLQMRNSI |
| | TGRTDVDYIISPVINNEGTFYDSRKDLDEITLPQDADANGAYNIARKALW |
| | IIEKLKESPDEELNKVKLAITQREWLEYAQINI* |
| SEQ ID NO: | MEKIKKPSNRNSIPSIIISDYDANKIKEIKVKYLKLARLDKITIQDMEIVDNI |
| 8 | VEFKKILLNGVEHTIIDNQKIEFDNYEITGCIKPSNKRRDGRISQAKYVVTI |
| | TDKYLRENEKEKRFKSTERELPNNTLLSRYKQISGFDTLTSKDIYKIKRYI |
| | DFKNEMLFYFQFIEEFFNPLLPKGKNFYDLNIEQNKDKVAKFIVYRLNDD |
| | FKNKSLNSYITDTCMIINDFKKIQKILSDFRHALAHFDFDFIQKFFDDQLD |
| | KNKFDINTISLIETLLDQKEEKNYQEKNNYIDDNDILTIFDEKGSKFSKLH |
| | NFYTKISQKKPAFNKLINSFLSQDGVPNEEFKSYLVTKKLDFFEDIHSNKE |
| | YKKIYIQHKNLVIKKQKEESQEKPDGQKLKNYNDELQKLKDEMNTITKQ |
| | NSLNRLEVKLRLAFGFIANEYNYNFKNFNDEFTNDVKNEQKIKAFKNSS |
| | NEKLKEYFESTFIEKRFFHFSVNFFNKKTKKEETKQKNIFNSIENETLEEL |
| | VKESPLLQIITLLYLFIPRELQGEFVGFILKIYHHTKNITSDTKEDEISIEDA |
| | QNSFSLKFKILAKNLRGLQLFHYSLSHNTLYNNKQCFFYEKGNRWQSVY |
| | KSFQISHNQDEFDIHLVIPVIKYYINLNKLMGDFEIYALLKYADKNSITVK |
| | LSDITSRDDLKYNGHYNFATLLFKTFGIDTNYKQNKVSIQNIKKTRNNLA |
| | HQNIENMLKAFENSEIFAQREEIVNYLQTEHRMQEVLHYNPINDFTMKT |
| | VQYLKSLSVHSQKEGKIADIHKKESLVPNDYYLIYKLKAIELLKQKVIEVI |
| | GESEDEKKIKNAIAKEEQIKKGNN |
| SEQ ID NO: | MEKSLNDFIGLYSVSKTLRFELKPVSETLENIKKFHFLEEDKKKANDYKD |
| 87 | VKKIIDNYHKYFIDDVLKNASFNWKKLEEAIREYNKNKSDDSALVAEQK |
| | KLGDAILKLFTSDKRYKALTAATPKELFESILPDWFGEQCNQDLNKAAL |
| | KTFQKFTSYFTGFQENRKNVYSAEAIPTAVPYRIVNDNFPKFLQNVLIFKT |
| | IQEKCPQIIDEVEKELSSYLGKEKLAGIFTLESFNKYLGQGGKENQRGIDF |
| | YNQIIGGVVEKEGGINLRGVNQFLNLYWQQHPDFTKEDRRIKMVPLYKQ |
| | ILSDRSSLSFKIESIENDEELKNALLECADKLELKNDEKKSIFEEVCDLFSS |
| | VKNLDLSGIYINRKDINSVSRILTGDWSWLQSRMNVYAEEKFTTKAEKA |
| | RWQKSLDDEGENKSKGFYSLTDLNEVLEYSSENVAETDIRITDYFEHRCR |
| | YYVDKETEMFVQGSELVALSLQEMCDDILKKRKAMNTVLENLSSENKL |
| | REKTDDVAVIKEYLDAVQELLHRIKPLKVNGVGDSTFYSVYDSIYSALSE |
| | VISVYNKTRNYITKKAASPEKYKLNFDNPTLADGWDLNKEQANTSVILR |
| | KDGMFYLGIMNPKNKPKFAEKYDCGNESCYEKMIYKQFDATKQIPKCST |
| | QKKEVQKYFLSGATEPYILNDKKSFKSELIITKDIWFMNNHVWDGEKFV |
| | PKRDNETRPKKFQIGYFKQTGDFDGYKNALSNWISFCKNFLQSYLSATV |
| | YDYNFKNSEEYEGLDEFYNYLNATCYKLNFINIPETEINKMVSEGKLYLF |
| | QIYNKDFASGSTGMPNMHTLYWKNLFSDENLKNVCLKLNGEAELFYRP |
| | AGIKEPVIHKEGSYLVNRTTEDGESIPEKIYFEIYKNANGKLEKLSDEAQN |
| | YISNHEVVIKKAGHEIIKDRHYTEPKFLFHVPLTINFKASGNSYSINENVR |
| | KFLKNNPDVNIIGLDRGERHLIYLSLINQKGEIIKQFTFNEVERNKNGRTIK |
| | VNYHEKLDQREKERDAARKSWQAIGKIAELKEGYLSAVIHQLTKLMVE |
| | YNAVVVMEDLNFGFKRGRFHVEKQVYQKFEHILIDKSNYLVFKDRGLN |
| | EPGGVLNGYQIAGQFESFQKLGKQSGMLFYVPAGYTSKIDPKTGFVSMM |
| | NFKDLTNVHKKRDFFSKFDNIHYDEANGSFVFTFDYKKFDGKAKEEMK |
| | LTKWSVYSRDKRIVYFAKTKSYEDVLPTEKLQKIFESNGIDYKSGNNIQD |
| | SVMAIGADLKEGAKPSKEISDFWDGLLSNFKLILQMRNSNARTGEDYIIS |
| | PVMADDGTFFDSREEFKKGEDAKLPLDADANGAYHIALKGLSLINKINL |
| | SKDEELKKFDMKISNADWFKFAQEKNYAK* |
| SEQ ID NO: | MENYGGFTGLYPLQKTLKFELRPQGRTMEHLVSSNFFEEDRDRAEKYKI |
| 9 | VKKVIDNYHKDFINECLSKRSFDWTPLMKTSEKYYASKEKNGKKKQDL |
| | DQKIIPTIENLSEKDRKELELEQKRMRKEIVSVFKEDKRFKYLFSEKLFSIL |
| | LKDEDYSKEKLTEKEILALKSFNKFSGYFIGLHKNRANFYSEGDESTAIA |
| | YRIVNENFPKFLSNLKKYREVCEKYPEIIQDAEQSLAGLNIKMDDIFPME |
| | NFNKVMTQDGIDLYNLAIGGKAQALGEKQKGLNEFLNEVNQSYKKGND |
| | RIRMTPLFKQILSERTSYSYILDAFDDNSQLITSINGFFTEVEKDKEGNTFD |
| | RAVGLIASYMKYDLSRVYIRKADLNKVSMEIFGSWERLGGLLRIFKSELY |
| | GDVNAEKTSKKVDKWLNSGEFSLSDVINAIAGSKSAETFDEYILKMRVA |
| | RGEIDNALEKIKCINGNFSEDENSKMIIKAILDSVQRLFHLFSSFQVRADFS |
| | QDGDFYAEYNEIYEKLFAIVPLYNRVRNYLTKNNLSMKKIKLNFKNPAL |
| | ANGWDLNKEYDNTAVIFLREGKYYLGIMNPSKKKNIKFEEGSGTGPFYK |
| | KMAYKLLPDPNKMLPKVFFAKKNINYYNPSDEIVKGYKAGKYKKGENF |
| | DIDFCHKLIDFFKESIQKNEDWRAFNYLFSATESYKDISDFYSEVEDQGY |
| | RMYFLNVPVANIDEYVEKGDLFLFQIYNKDFASGAKGNKDMHTIYWNA |
| | AFSDENLRNVVVKLNGEAELFYRDKSIIEPICHKKGEMLVNRTCFDKTPV |
| | PDKIHKELFDYHNGRAKTLSIEAKGYLDRVGVFQASYEIIKDRRYSENK |
| | MYFHVPLKLNFKADGKKNLNKMVIEKFLSDKDVHIIGIDRGERNLLYYS |
| | VIDRRGNIIDQDSLNIIDGFDYQKKLGQREIERREARQSWNSIGKIKDLKE |
| | GYLSKAVHKVSKMVLEYNAIVVLEDLNFGFKRGRFKVEKQVYQKFEK |
| | MLIDKLNYLVFKEVLDSRDAGGVLNAYQLTTQLESFNKLGKQSGILFYV |
| | PAAYTSKIDPTTGFVSLFNTSRIESDSEKKDFLSGFDSIVYSAKDGGIFAFK |
| | FDYRNRNFQREKTDHKNIWTVYTNGDRIKYKGRMKGYEITSPTKRIKDV |
| | LSSSGIRYDDGQELRDSIIQSGNKVLINEVYNSFIDTLQMRNSDGEQDYIIS |
| | PVKNRNGEFFRTDPDRRELPVDADANGAYHIALRGELLMQKIAEDFDPK |
| | SDKFTMPKMEHKDWFEFMQTRGD* |
| SEQ ID NO: | MEVQKTVMKTLSLRILRPLYSQEIEKEIKEEKERRKQAGGTGELDGGFY |
| 10 | KKLEKKHSEMFSFDRLNLLLNQLQREIAKVYNHAISELYIATIAQGNKSN |
| | KHYISSIVYNRAYGYFYNAYIALGICSKVEANFRSNELLTQQSALPTAKS |
| | DNFPIVLHKQKGAEGEDGGFRISTEGSDLIFEIPIPFYEYNGENRKEPYKW |
| | VKKGGQKPVLKLILSTFRRQRNKGWAKDEGTDAEIRKVTEGKYQVSQIE |
| | INRGKKLGEHQKWFANFSIEQPIYERKPNRSIVGGLDVGIRSPLVCAINNS |
| | FSRYSVDSNDVFKFSKQVFAFRRRLLSKNSLKRKGHGAAHKLEPITEMT |
| | EKNDKFRKKIIERWAKEVTNFFVKNQVGIVQIEDLSTMKDREDHFFNQY |
| | LRGFWPYYQMQTLIENKLKEYGIEVKRVQAKYTSQLCSNPNCRYWNNY |
| | FNFEYRKVNKFPKFKCEKCNLEISADYNAARNLSTPDIEKFVAKATKGIN |
| | LPEK* |
| SEQ ID NO: | MIIHNCYIGGSFMKKIDSFTNCYSLSKTLRFKLIPIGATQSNFDLNKMLDE |
| 11 | DKKRAENYSKAKSIIDKYHRFFIDKVLSSVTENKAFDSFLEDVRAYAELY |
| | YRSNKDDSDKASMKTLESKMRKFIALALQSDEGFKDLFGQNLIKKTLPE |
| | FLESDTDKEIIAEFDGFSTYFTGFFNNRKNMYSADDQPTAISYRCINDNLP |
| | KFLDNVRTFKNSDVASILNDNLKILNEDFDGIYGTSAEDVFNVDYFPFVL |
| | SQKGIEAYNSILGGYTNSDGSKIKGLNEYINLYNQKNENIHRIPKMKQLF |
| | KQILSERESVSFIPEKFDSDDDVLSSINDYYLERDGGKVLSIEKTVEKIEKL |
| | FSAVTDYSTDGIFVKNAAELTAVCSGAFGYWGTVQNAWNNEYDALNG |
| | YKETEKYIDKRKKAYKSIESFSLADIQKYADVSESSETNAEVTEWLRNEI |
| | KEKCNLAVQGYESSKDLISKPYTESKKLFNNDNAVELIKNALDSVKELE |
| | NVLRLLLGTGKEESKDENFYGEFLPCYERICEVDSLYDKVRNYMTQKLY |
| | KTDKIKLNFQNPQFLGGWDRNKEADYSAVLLRRNSLYYIAIMPSGYKRV |
| | FEKIPAPKADETVYEKVIYKLLPGPNKMLPKVFFSKKGIETFNPPKEILEK |
| | YELGTHKTGDGFNLDDCHALIDYFKSALDVHSDWSNFGFRFSDTSTYKN |
| | IADFYNEVKNQGYKITFCDVPQSYINELVDEGKLYLFQLYNKDFSEHSKG |
| | TPNLHTLYFKMLFDERNLENVVFKLNGEAEMFYREASISKDDMIVHPKN |
| | QPIKNKNEQNSRKQSTFEYDIVKDRRYTVDQFMLHIPITLNFTANGGTNI |
| | NNEVRKALKDCDKNYVIGIDRGERNLLYICVVDSEGRIIEQYSLNEIINEY |
| | NGNTYSTDYHALLDKKEKERLESRKAWKTVENIKELKEGYISQVVHKIC |
| | ELVEKYDAVIVMEDLNLGFKQGRSGKFEKSVYQKFEKMLIDKLNYFAD |
| | KKKSPEEIGSVLNAYQLTNAFESFEKMGKQNGFIFYVPAYLTSKIDPTTG |
| | FADLLHPSSKQSKESMRDFVGRFDSITFNKTENYFEFELDYNKFPRCNTD |
| | YRKKWTVCTYGSRIKTFRNPEKNSEWDNKTVELTPAFMALFEKYSIDVN |
| | GDIKAQIMSVDKKDFFVELIGLLRLTLQMRNSETGKVDRDYLISPVKNSE |
| | GVFYNSDDYKGIENASLPKDADANGAYNIARKGLWIIEQIKACENDAEL |
| | NKIRLAISNAEWLEYAQKK* |
| SEQ ID NO: | MKDYIRKTLSLRILRPYYGEEIEKEIAAAKKKSQAEGGDGALDNKFWDR |
| 12 | LKAEHPEIISSREFYDLLDAIQRETTLYYNRAISKLYHSLIVEREQVSTAKA |
| | LSAGPYHEFREKFNAYISLGLREKIQSNFRRKELARYQVALPTAKSDTFPI |
| | PIYKGFDKNGKGGFKVREIENGDFVIDLPLMAYHRVGGKAGREYIELDR |
| | PPAVLNVPVILSTSRRRANKTWFRDEGTDAEIRRVMAGEYKVSWVEILQ |
| | RKRFGKPYGGWYVNFTIKYQPRDYGLDPKVKGGIDIGLSSPLVCAVTNS |
| | LARLTIRDNDLVAFNRKAMARRRTLLRQNRYKRSGHGSANKLKPIEALT |
| | EKNELYRKAIMRRWAREAADFFRQHRAATVNMEDLTGIKDREDYFSQM |
| | LRCYWNYSQLQTMLENKLKEYGIAVKYIEPKDTSKTCHSCGHVNEYFDF |
| | NYRSAHKFPMFKCEKCGVECGADYNAARNIAQA |
| SEQ ID NO: | MKEQFINRYPLSKTLRFSLIPVGETENNFNKNLLLKKDKQRAENYEKVK |
| 13 | CYIDRFHKEYIESVLSKARIEKVNEYANLYWKSNKDDSDIKAMESLEND |
| | MRKQISKQLTSTEIYKKRLFGKELICEDLPSFLTDKDERETVECFRSFTTY |
| | FKGFNTNRENMYSSDGKSTAIAYRCINDNLPRFLDNVKSFQKVFDNLSD |
| | ETITKLNTDLYNIFGRNIEDIFSVDYFEFVLTQSGIEIYNSMIGGYTCSDKT |
| | KIQGLNECINLYNQQVAKNEKSKKLPLMKPLYKQILSEKDSVSFIPEKFN |
| | SDNEVLHAIDDYYTGHIGDFDLLTELLQSLNTYNANGIFVKSGVAITDISN |
| | GAFNSWNVLRSAWNEKYEALHPVTSKTKIDKYIEKQDKIYKAIKSFSLFE |
| | LQSLGNENGNEITDWYISSINESNSKIKEAYLQAQKLLNSDYEKSYNKRL |
| | YKNEKATELVKNLLDAIKEFQKLIKPLNGTGKEENKDELFYGKFTSYYD |
| | SIADIDRLYDKVRNYITQKPYSKDKIKLNFDNPQLLGGWDKNKESDYRT |
| | VLLHKDGLYYLAVMDKSHSKAFVDAPEITSDDKDYYEKMEYKLLPGPN |
| | KMLPKVFFASKNIDTFQPSDRILDIRKRESFKKGATFNKAECHEFIDYFKD |
| | SIKKHDDWSQFGFKFSPTESYNDISEFYREISDQGYSVRFNKISKNYIDGL |
| | VNNGYIYLFQIYNKDFSKYSKGTPNLHTLYFKMLFDERNLSNVVYKLNG |
| | EAEMFYREASIGDKEKITHYANQPIKNKNPDNEKKESVFEYDIVKDKRFT |
| | KRQFSLHLPITINFKAHGQEFLNYDVRKAVKYKDDNYVIGIDRGERNLIY |
| | ISVINSNGEIVEQMSLNEIISDNGHKVDYQKLLDTKEKERDKARKNWTSV |
| | ENIKELKEGYISQVVHKICELVIKYDAVIAMEDLNFGFKRGRFPVEKQVY |
| | QKFENMLISKLNLLIDKKAEPTEDGGLLRAYQLTNKFDGVNKAKQNGIIF |
| | YVPAWDTSKIDPATGFVNLLKPKCNTSVPEAKKLFETIDDIKYNANTDM |
| | FEFYIDYSKFPRCNSDFKKSWTVCTNSSRILTFRNKEKNNKWDNKQIVLT |
| | DEFKSLFNEFGIDYKGNLKDSILSISNADFYRRLIKLLSLTLQMRNSITGST |
| | LPEDDYLISPVANKSGEFYDSRNYKGTNAALPCDADANGAYNIARKAL |
| | WAINVLKDTPDDMLNKAKLSITNAEWLEYTQK* |
| SEQ ID NO: | MKEQFVNQYPISKTLRFSLIPIGKTEENFNKNLLLKEDEKKAEEYQKVKG |
| 14 | YIDRYHKFFIETALCNINFEGFEEYSLLYYKCSKDDNDLKTMEDIEIKLRK |
| | QISKTMTSHKLYKDLFGENMIKTILPNFLDSDEEKNSLEMFRGFYTYFSG |
| | FNTNRKNMYTEEAKSTSIAYRCINDNLPKFLDNSKSFEKIKCALNKEELK |
| | AKNEEFYEIFQIYATDIFNIDFFNFVLTQPGIDKYNGIIGGYTCSDGTKVQG |
| | LNEIINLYNQQIAKDDKSKRLPLLKMLYKQILSDRETVSFIPEKFSSDNEV |
| | LESINNYFSKNVSNAIKSLKELFQGFEAYNMNGIFISSGVAITDLSNAVFG |
| | DWNAISTAWEKAYFETNPPKKNKSQEKYEEELKANYKKIKSFSLDEIQR |
| | LGSIAKSPDSIGSVAEYYKITVTEKIDNITELYDGSKELLNCNYSESYDKK |
| | LIKNDTVIEKVKTLLDAVKSLEKLIKPLVGTGKEDKDELFYGTFLPLYTSL |
| | SAVDRLYDKVRNYATQKPYSKDKIKLNFNCSSFLSGWATDYSSNGGLIF |
| | EKDGLYYLGIVNKKFTTEEIDYLQQNADENPAQRIVYDFQKPDNKNTPR |
| | LFIRSKGTNYSPSVKEYNLPVEEIVELYDKRYFTTEYRNKNPELYKASLV |
| | KLIDYFKLGFTRHESYRHYDFKWKKSEEYNDISEFYKDVEISCYSLKQEK |
| | INYNTLLNFVAENRIYLFQIYNKDFSKYSKGTPNLHTRYFKALFDENNLS |
| | DVVFKLNGGSEMFFRKASIKDNEKVVHPANQPIDNKNPDNSKKQSTFDY |
| | ELIKDKRFTKHQFSIHIPITMNFKARGRDFINNDIRKAIKSEYKPYVIGIDR |
| | GERNLIYISVINNNGEIVEQMSLNDIISDNGYKVDYQRLLDRKEKERDNA |
| | RKSWGTIENIKELKEGYISQVIHKICELVIKYDAVIAMEDLNFGFKRGRFN |
| | VEKQVYQKFENMLISKLNYLCDKKSEANSEGGLLKAYQLTNKFDGVNK |
| | GKQNGIIFYVPAWLTSKIDPVTGFVDLLHPKYISVEETHSLFEKLDDIRYN |
| | FEKDMFEFDIDYSKLPKCNADFKQKWTVCTNADRIMTFRNSEKNNEWD |
| | NKRILLSDEFKRLFEEFGIDYCHNLKNKILSISNKDFCYRFIKLFALTMQM |
| | RNSITGSTNPEDDYLISPVRDENGVFYDSRNFIGSKAGLPIDADANGAYNI |
| | ARKGLWAINAIKSTADDMLDKVDLSISNAKWLEYVQK* |
| SEQ ID NO: | MKITKIDGILHKKYIKEGKLVKSTSEENKTDERLSELLTIRLDTYIKNPDN |
| 15 | ASEEENRIRRETLKEFFSNKVLYLKDSILYLKDRREKNQLQNKNYSEEDIS |
| | EYDLKNKNSFLVLKKILLNEDINSEELEIFRNDFEKKLDKINSLKYSLEEN |
| | KANYQKINENNIKKVEGKSKRNIFYNYYKDSAKRNDYINNIQEAFDKLY |
| | KKEDIENLFFLIENSKKHEKYKIRECYHKIIGRKNDKENFATIIYEEIQNVN |
| | NMKELIEKVPNVSELKKSQVFYKYYLNKEKLNDENIKYVFCHFVEIEMS |
| | KLLKNYVYKKPSNISNDKVKRIFEYQSLKKLIENKLLNKLDTYVRNCGK |
| | YSFYLQDGEIATSDFIVGNRQNEAFLRNIIGVSSTAYFSLRNILETENENDI |
| | TGRIKGKTVKNKKGEEKYISGEIDKLYDNNKQNEVKKNLKMFYSYDFN |
| | MNRKKEIEDFFSNIDEAISSIRHGIVHFNLELEGKDIFTFKNIVPSQISKKMF |
| | QNEINEKKLKLKIFRQLNSANVFRYLEKYKILNYLNRTRFEFVNKNIPFVP |
| | SFTKLYSRIDDLKNSLCIYWKIPKANDNNKTKEITDAQIYLLKNIYYGEFL |
| | NYFMSNNGNFFEIIKEIIELNKNDKRNLKTGFYKLQKFENLQEKTPKEYL |
| | ANIQSFYMIDAGNKDEEEKDAYIDFIQKIFLKGFMTYLANNGRLSLMYIG |
| | NDEQINTSLAGKKQEFDKFLKKYEQNNNIEIPHEINEFVREIKLGKILKYT |
| | ESLNMFYLILKLLNHKELTNLKGSLEKYQSANKEEAFSDQLELINLLNLD |
| | NNRVTEDFELEADEIGKFLDFNGNKVKDNKELKKFDTNKIYFDGENIIKH |
| | RAFYNIKKYGILNLLEKISDEAKYKISIEELKNYSNKKIEIEKNHTTQENLH |
| | RKYARPRKDEKFNDEDYKKYEKTIRNIQQYTHLKNKVEFNELNLLQSLL |
| | LRILHRLVGYTSIWERDLRFRLKGEFPENQYIEEIFNFDNSKNVKYKNGQI |
| | VEKYISFYKELYKDDMEKISIYSDKKVKELKKEKKDLYIRNYIAHFNYIP |
| | NAEVSLLEVLENLRKLLSYDRKLKNAIMKSIVDILKEYGFVVTFKIEKDK |
| | KIRIESLKSEEVVHLKKLKLKDNDKKKEPIKTYRNSKELCKLVKVMFEY |
| | KMKEKKSEN* |
| SEQ ID NO: | MKITKIDGISHKKYIKEGKLVKSTSEENKTDERLSELLTIRLDTYIKNPDN |
| 16 | ASEEENRIRRENLKEFFSNKVLYLKDGILYLKDRREKNQLQNKNYSEEDI |
| | SEYDLKNKNSFLVLKKILLNEDINSEELEIFRKDVEAKLNKINSLKYSFEE |
| | NKANYQKINENNVEKVGGKSKRNIIYDYYRESAKRNDYINNVQEAFDK |
| | LYKKEDIEKLFFLIENSKKHEKYKIRECYHKIIGRKNDKENFAKIIYEEIQN |
| | VNNIKELIEKVPDMSELKKSQVFYKYYLDKEELNDKNIKYAFCHFVEIE |
| | MSQLLKNYVYKRLSNISNDKIKRIFEYQNLKKLIENKLLNKLDTYVRNC |
| | GKYNYYLQDGEIATSDFIAGNRQNEAFLRNIIGVSSVAYFSLRNILETENK |
| | DDITGKMRGKTRIDSKTGEEKYIPGEVDQIYYENKQNEVKNKLKMFYGY |
| | DFDMDNKKEIEDFFANIDEAISSIRHGIVHFNLDLDGKDIFAFKNIVPSEIS |
| | KKMFQNEINEKKLKLKIFRQLNSANVFRYLEKYKILNYLKRTRFEFVNK |
| | NIPFVPSFTKLYSRIDDLKNSLGIYWKTPKTNDDNKTKEIIDAQIYLLKNIY |
| | YGEFLNYFMSNNGNFFEISREIIELNKNDKRNLKTGFYKLQKFEDIQEKTP |
| | KKYLANIQSLYMINAGNQDEEEKDTYIDFIQKIFLKGFMTYLANNGRLSL |
| | MYIGNDEQINTSLAGKKQEFDKFLKKYEQNNNIEIPHEINEFLREIKLGKI |
| | LKYTESLNMFYLILKLLNHKELTNLKGSLEKYQSANKEETFSDELELINL |
| | LNLDNNRVTEDFELEANEIGKFLDFNGNKIKDRKELKKFDTKKIYFDGEN |
| | IIKHRAFYNIKKYGMLNLLEKIADKAKYKISLKELKEYSNKKNEIEKNYT |
| | MQQNLHRKYARPKKDEKFNDEDYKEYEKAIGNIQKYTHLKNKVEFNEL |
| | NLLQGLLLKILHRLVGYTSIWERDLRFRLKGEFPENQYIEEIFNFDNSKNV |
| | KYKSGQIVEKYINFYKELYKDNVEKRSIYSDKKVKKLKQEKKDLYIRNY |
| | IAHFNYIPHAEISLLEVLENLRKLLSYDRKLKNAIMKSVVDILKEYGFVAT |
| | FKIGADKKIGIQTLESEKIVHLKNLKKKKLMTDRNSEELCKLVKVMFEY |
| | KMEEEKNLKTKKCKVI* |
| SEQ ID NO: | MKKIDNFVGCYPVSKTLRFKAIPIGKTQENIEKKRLVEEDEVRAKDYKA |
| 17 | VKKLIDRYHREFIEGVLDNVKLDGLEEYYMLFNKSDREESDNKKIEIMEE |
| | RFRRVISKSFKNNEEYKKIFSKKIIEEILPNYIKDEEEKELVKGFKGFYTAF |
| | VGYAQNRENMYSDEKKSTAISYRIVNENMPRFITNIKVFEKAKSILDVDK |
| | INEINEYILNNDYYVDDFFNIDFFNYVLNQKGIDIYNAIIGGIVTGDGRKIQ |
| | GLNECINLYNQENKKIRLPQFKPLYKQILSESESMSFYIDEIESDDMLIDM |
| | LKESLQIDSTINNAIDDLKVLFNNIFDYDLSGIFINNGLPITTISNDVYGQW |
| | STISDGWNERYDVLSNAKDKESEKYFEKRRKEYKKVKSFSISDLQELGG |
| | KDLSICKKINEIISEMIDDYKSKIEEIQYLFDIKELEKPLVTDLNKIELIKNSL |
| | DGLKRIERYVIPFLGTGKEQNRDEVFYGYFIKCIDAIKEIDGVYNKTRNYL |
| | TKKPYSKDKFKLYFENPQLMGGWDRNKESDYRSTLLRKNGKYYVAIID |
| | KSSSNCMMNIEEDENDNYEKINYKLLPGPNKMLPKVFFSKKNREYFAPS |
| | KEIERIYSTGTFKKDTNFVKKDCENLITFYKDSLDRHEDWSKSFDFSFKES |
| | SAYRDISEFYRDVEKQGYRVSFDLLSSNAVNTLVEEGKLYLFQLYNKDF |
| | SEKSHGIPNLHTMYFRSLFDDNNKGNIRLNGGAEMFMRRASLNKQDVT |
| | VHKANQPIKNKNLLNPKKTTTLPYDVYKDKRFTEDQYEVHIPITMNKVP |
| | NNPYKINHMVREQLVKDDNPYVIGIDRGERNLIYVVVVDGQGHIVEQLS |
| | LNEIINENNGISIRTDYHTLLDAKERERDESRKQWKQIENIKELKEGYISQ |
| | VVHKICELVEKYDAVIALEDLNSGFKNSRVKVEKQVYQKFEKMLITKLN |
| | YMVDKKKDYNKPGGVLNGYQLTTQFESFSKMGTQNGIMFYIPAWLTSK |
| | MDPTTGFVDLLKPKYKNKADAQKFFSQFDSIRYDNQEDAFVFKVNYTK |
| | FPRTDADYNKEWEIYTNGERIRVFRNPKKNNEYDYETVNVSERMKELFD |
| | SYDLLYDKGELKETICEMEESKFFEELIKLFRLTLQMRNSISGRTDVDYLI |
| | SPVKNSNGYFYNSNDYKKEGAKYPKDADANGAYNIARKVLWAIEQFK |
| | MADEDKLDKTKISIKNQEWLEYAQTHCE |
| SEQ ID NO: | MKKIDSFVNYYPLSKTLRFSLIPVGKTEDNFNAKLLLEEDEKRAIEYEKV |
| 18 | KRYIDRYHKHFIETVLANFHLDDVNEYAELYYKAGKDDKDLKYMEKLE |
| | GKMRKSISAAFTKDKKYKEIFGQEIIKNILPEFLENEDEKESVKMFQGFFT |
| | YFTGFNDNRKNMYTHEAQTTAISYRCINENLPKFLDNVQSFAKIKESISS |
| | DIMNKLDEVCMDLYGVYAQDMFCTDYFSFVLSQSGIDRYNNIIGGYVD |
| | DKGVKIQGINEYINLYNQQVDEKNKRLPLMKKLYKQILIEKESISFIPEKF |
| | ESDNIVINAISDYYHNNVENLFDDFNKLFNEFSEYDDNGIFVTSGLAVTDI |
| | SNAVFGSWNIISDSWNEEYKDSHPMKKTTNAEKYYEDMKKEYKKNLSF |
| | TIAELQRLGEAGCNDECKGDIKEYYKTTVAEKIENIKNAYEISKDLLASD |
| | YEKSNDKKLCKNDSAISLLKNLLDSIKDLEKTIKPLLGTGKEENKDDVFY |
| | GKFTNLYEMISEIDRLYDKVRNYVTQKPYSKDKIKLNFENPQHLGGWDK |
| | NKERDYRSVLLKKEDKYYLAIMDKSNNKAFIDFPDDGECYEKIEYKLLP |
| | GPNKMLPKVFFASSNIEYFAPSKKILEIRSRESFKKGDMFNLKDCHEFIDF |
| | FKESIKKHEDWSQFGFEFSPTEKYNDISEFYNEVKIQGYSLKYKNVSKKY |
| | IDELIECGQLYLFQIYNKDFSVYAKGNPNLHTMYFKMLFDERNLANVVY |
| | QLNGGAEMFYRKASIKDSEKIVHHANQPIKNKNADNVKKESVFEYDIIK |
| | DKRFTKRQFSIHIPITLNFKAKGQNFINNDVRMALKKADENYVIGIDRGE |
| | RNLLYICVINSKGEIVEQKSLNEIIGDNGYRVDYHKLLDKKEAERDEARK |
| | SWGTIENIKELKEGYLSQIVHEISKLVIKYDAVIAIEDLNSGFKKGRFKVE |
| | KQVYQKFENMLCTKLNYLVDKNADANECGGLLKAYQLTNKEDGANRG |
| | RQNGIIFSVPAWLTSKIDPVTGFADLLRPKYKSVSESVEFISKIDNIRYNSK |
| | EDYFEFDIDYSKFPNSTASYKKKWTVCTYGERIINVRNKEKNNMWDNK |
| | TIVLTDEFKKLFADFGVDVSKNIKESVLAIDSKDFYYRFINLLANTLQLRN |
| | SEVGNVDVDYLISPVKGVDGSFYDSRLVKEKTLPENADANGAYNIARKA |
| | LWAIDVLKQTKDEELKNANLSIKNAEWLEYVQK* |
| SEQ ID NO: | MKNQNTLPSNPTDILKDKPFWAAFFNLARHNVYLTVNHINKLLDLEKLY |
| 19 | NKDKHKEIFEHEDIFNISDDVMNDVNSNGKKRKLDIKKIWANLDTDLTR |
| | KYQLRELILKHFPFIQPAIIGAQTKERTTIDKDKRSTSTSNDSLKPTGEGDI |
| | NDPLSLSNVKSIFFRLLQMLEQLRNYYSHVKHSKSATMPNFDEGLLKSM |
| | YNIFIDSVNKVKEDYSSNSVIDPNTSFSHLISKDEQGEIKPCRYSFTSKDGS |
| | INASGLLFFVSLFLEKQDSIWMQKKIPGFKKTSENYMKMTNEVFCRNHIL |
| | LPKMRLETVYDKDWMLLDMLNEVVRCPLSLYKRLAPADQNKFKVPEK |
| | SSDNANRQEDDNPFSRILVRHQNRFPYFALRFFDLNEVFTTLRFQINLGC |
| | YHFAICKKQIGDKKEVHHLTRTLYGFSRLQNFTQNTRPEEWNTLVKTTE |
| | PSSGNDGKTVQGVPLPYISYTIPHYQIENEKIGIKIFDGDTAVDTDIWPSVS |
| | TEKQLNKPDKYTLTPGFKADVFLSVHELLPMMFYYQLLLCEGMLKTDA |
| | GNAVEKVLIDTRNAIFNLYDAFVQEKINTITDLENYLQDKPILIGHLPKQ |
| | MIDLLKGHQRDMLKAVEQKKAMLIKDTERRLERLNKQPEQKPNVAAK |
| | NTGTLLRNGQIADWLVKDMMRFQPVKRDKEGNPINCSKANSTEYQMLQ |
| | RAFAFYTTDSYRLPRYFEQLHLINCDNSHLFLSRFEYDKQPNLIAFYAAY |
| | LEAKLEFLNELQPQNWASDNYFLLLRAPKNDRQKLAEGWKNGFNLPRG |
| | LFTEKIKTWFNEHKTIVDISDCDIFKNRVGQVARLIPVFFDKKFKDHSQPF |
| | YTYNFNVGNVSKITEANYLSKEKRENLFKSYQNKFKNNIPAEKTKEYRE |
| | YKNFSSWKKFERELRLIKNQDILTWLMCKNLFDEKIKPKKDILEPRIAVS |
| | YIKLDSLQTNTSTAGSLNALAKVVPMTLAIHIDSPKPKGKAGNNEKENK |
| | EFTVYIKEEGTKLLKWGNFKTLLADRRIKGLFSYIEHDDINLEKYPLTKY |
| | QVDSELDLYQKYRIDIFKQTLDLEAQLLDKYSDLNTDNFNQMLSGWSEK |
| | EGIPRNIKQDVAFLIGVRNGFSHNQYPDSKRIAFSRIKKENPKTSSLQESEG |
| | LNIAKQMYEEAQQVVNKIKNIESFD* |
| SEQ ID NO: | MKVTKIDGISHKKFEDEGKLVKFTGHFNIKNEMKERLEKLKELKLSNYIK |
| 20 | NPENVKNKDKNKEKETKSRRENLKKYFSEIILRKKEEKYLLKKTRKFKNI |
| | TEEINYDDIKKRENQQKIFDVLKELLEQRINENDKEEILNFDSVKLKEAFE |
| | EDFIKKELKIKAIEESLEKNRADYRKDYVELENEKYEDVKGQNKRSLVFE |
| | YYKNPENREKFKENIKYAFENLYTEENIKNLYSEIKEIFEKVHLKSKVRYF |
| | YQNEIIGESEFSEKDEEGISILYKQIINSVEKKEKFIEFLQKVKIKDLTRSQIF |
| | YKYFLENEELNDENIKYVFSYFVEIEVNKLLKENVYKTKKFNEGNKYRV |
| | KNIFNYDKLKNLVVYKLENKLNNYVRNCGKYNYHMENGDIATSDINM |
| | KNRQTEAFLRSILGVSSFGYFSLRNILGVNDDDFYKIEKDERKNENFILKK |
| | AKEDFTSKNIFEKVVDKSFEKKGIYQIKENLKMFYGNSFDKVDKDELKK |
| | FFVNMLEAITSVRHRIVHYNINTNSENIFDFSNIEVSKLLKNIFEKEIDTRE |
| | LKLKIFRQLNSAGVFDYWESWVIKKYLENVKFEFVNKNVPFVPSFKKLY |
| | DRIDNLKGWNALKLGNNINIPKRKEAKDSQIYLLKNIYYGEFVEKFVND |
| | NKNFEKIVKEIIEINRGAGTNKKTGFYKLEKFETLKANTPTKYLEKLQSL |
| | HKISYDKEKIEEDKDVYVDFVQKIFLKGFVNYLKKLDSLKSLNLLNLRK |
| | DETITDKKSVHDEKLKLWENSGSNLSKMPEEIYEYVKKIKISNINYNDRM |
| | SIFYLLLKLIDYRELTNLRGNLEKYESMNKNKIYSEELTIINLVNLDNNKV |
| | RTNFSLEAEDIGKFLKSSITIKNIAQLNNFSKIFADGENVIKHRSFYNIKKY |
| | GILDLLEKIVAKADLKITKEEIKKYENLQNELKRNDFYKIQEQIHRNYNQ |
| | KPFSIKKIENKKDFEKYKKVIEKIQDYTQLKNKIEFNDLNLLQSLIFRILHR |
| | LAGYTSLWERDLQFKLKGEFPEDKYIDEIFNSDGNNNQKYKHGGIADKY |
| | ANFLIEKKEEKSGEILNKKQRKKKIKEDLEIRNYIAHFNYLPNAEKSILEIL |
| | EELRELLKHDRKLKNAVMKSIKDIFREYGFIVEFTISHTKNGKKIKVCSV |
| | KSEKIKHLKNNELITTRNSEDLCELVKIMLEHKELQK* |
| SEQ ID NO: | MKVTKVGGISHKKYTSEGRLVKSESEENRTDERLSALLNMRLDMYIKNP |
| 21 | SSTETKENQKRIGKLKKFFSNKMVYLKDNTLSLKNGKKENIDREYSETDI |
| | LESDVRDKKNFAVLKKIYLNENVNSEELEVFRNDIKKKLNKINSLKYSFE |
| | KNKANYQKINENNIEKVEGKSKRNIIYDYYRESAKRDAYVSNVKEAFDK |
| | LYKEEDIAKLVLEIENLTKLEKYKIREFYHEIIGRKNDKENFAKIIYEEIQN |
| | VNNMKELIEKVPDMSELKKSQVFYKYYLDKEELNDKNIKYAFCHFVEIE |
| | MSQLLKNYVYKRLSNISNDKIKRIFEYQNLKKLIENKLLNKLDTYVRNC |
| | GKYNYYLQDGEIATSDFIARNRQNEAFLRNIIGVSSVAYFSLRNILETENE |
| | NDITGRMRGKTVKNNKGEEKYVSGEVDKIYNENKKNEVKENLKMFYS |
| | YDFNMDNKNEIEDFFANIDEAISSIRHGIVHFNLELEGKDIFAFKNIAPSEIS |
| | KKMFQNEINEKKLKLKIFRQLNSANVFRYLEKYKILNYLKRTRFEFVNK |
| | NIPFVPSFTKLYSRIDDLKNSLGIYWKTPKTNDDNKTKEIIDAQIYLLKNIY |
| | YGEFLNYFMSNNGNFFEISKEIIELNKNDKRNLKTGFYKLQKFEDIQEKIP |
| | KEYLANIQSLYMINAGNQDEEEKDTYIDFIQKIFLKGFMTYLANNGRLSL |
| | IYIGSDEETNTSLAEKKQEFDKFLKKYEQNNNIKIPYEINEFLREIKLGNIL |
| | KYTERLNMFYLILKLLNHKELTNLKGSLEKYQSANKEEAFSDQLELINLL |
| | NLDNNRVTEDFELEADEIGKFLDFNGNKVKDNKELKKFDTNKIYFDGEN |
| | IIKHRAFYNIKKYGMLNLLEKIADKAGYKISIEELKKYSNKKNEIEKNHK |
| | MQENLHRKYARPRKDEKFTDEDYESYKQAIENIEEYTHLKNKVEFNELN |
| | LLQGLLLRILHRLVGYTSIWERDLRFRLKGEFPENQYIEEIFNFENKKNVK |
| | YKGGQIVEKYIKFYKELHQNDEVKINKYSSANIKVLKQEKKDLYIRNYIA |
| | HFNYIPHAEISLLEVLENLRKLLSYDRKLKNAVMKSVVDILKEYGFVATF |
| | KIGADKKIGIQTLESEKIVHLKNLKKKKLMTDRNSEELCKLVKIMFEYK |
| | MEEKKSEN |
| SEQ ID NO: | MNELVKNRCKQTKTICQKLIPIGKTRETIEKYNLMEIDRKIAANKELMNK |
| 22 | LFSLIAGKHINDTLSKCTDLDFEPLLTSLSSLNNAKENDRDNLREYYDSVF |
| | EEKKTLAEEISSRLTAVKFAGKDFFTKNIPDFLETYEGDDKNEMSELVSL |
| | VIENTVTAGYVKKLEKIDRSMEYRLVSGTVVKRVLTDNADIYEKNIEKA |
| | KDFDYGVLNIDEASQFTTLVAKDYANYLTADGIAIYNVGIGKINLALNEY |
| | CQKNKEYSYNKLALLPLQKMLYGEKLSLFEKLEDFTSDEELINSYNKFA |
| | KTVNESGLAEIIKKAVPSYDEIVIKPNKISNYSNSITGHWSLVNRIMKDYL |
| | ENNGIKNADKYMEKGLTLSEIGDALENKNIKHSDFISNLINDLGHTYTEIK |
| | ENKESLKKDESVNALIIKKELDMLLSILQNLKVFDIDNEMFDTGFGIEVSK |
| | AIEILGYGVPLYNKIRNYITKKPDPKKKFMTKFGSATIGTGITTSVEGSKK |
| | ATFLKDGDAVFLLLYNTAGCKANNVSVSNLADLINSSLEIENSGKCYQK |
| | MIYQTPGDIKKQIPRVFVYKSEDDDLIKDFKAGLHKTDLSFLNGRLIPYL |
| | KEAFATHETYKNYTFSYRNSYESYDEFCEHMSEQAYILEWKWIDKKLID |
| | DLVEDGSLLMFRVWNRFMKKKEGKISKHAKIVNELFSDENASNAAIKLL |
| | SVFDIFYRDKQIDNPIVHKAGTTLYNKRTKDGEVIVDYTTMVKNKEKRP |
| | NVYTTTKKYDIIKDRRYTEEQFEIHLHVNIGKEENKEKLETSKVINEKKN |
| | TLVVTRSNEHLLYVVIFDENDNILLKKSLNTVKGMNFKSKLEVVEIQKKE |
| | NMQSWKTVGSNQALMEGYLSFAIKEIADLVKEYDAILVLEQNSVGKNIL |
| | NERVYTRFKEMLITNLSLDVDYENKDFYSYTELGGKVASWRDCVTNGIC |
| | IQVPSAYKYKDPTTSFSTISMYAKTTAEKSKKLKQIKSFKYNRERGLFEL |
| | VIAKGVGLENNIVCDSFGSRSIIENDISKEVSCTLKIEKYLIDAGIEYNDEK |
| | EVLKDLDTAAKTDAVHKAVTLLLKCFNESPDGRYYISPCGEHFTLCDAP |
| | EVLSAINYYIRSRYIREQIVEGVKKMEYKKTILLAK* |
| SEQ ID NO: | MNGNRIIVYREFVGVTPVAKTLRNELRPIGHTQEHIIHNGLIQEDELRQEK |
| 23 | STELKNIMDDYYREYIDKSLSGVTDLDFTLLFELMNLVQSSPSKDNKKAL |
| | EKEQSKMREQICTHMQSDSNYKNIFNAKFLKEILPDFIKNYNQYDAKDK |
| | AGKLETLALFNGFSTYFTDFFEKRKNVFTKEAVSTSIAYRIVHENSLTFLA |
| | NMTSYKKISEKALDEIEVIEKNNQDKMGDWELNQIFNPDFYNMVLIQSGI |
| | DFYNEICGVVNAHMNLYCQQTKNNYNLFKMRKLHKQILAYTSTSFEVP |
| | KMFEDDMSVYNAVNAFIDETEKGNIIGKLKDIVNKYDELDEKRIYISKDF |
| | YETLSCFMSGNWNLITGCVENFYDENIHAKGKSKEEKVKKAVKEDKYK |
| | SINDVNDLVEKYIDEKERNEFKNSNAKQYIREISNIITDTETAHLEYDEHIS |
| | LIESEEKADEMKKRLDMYMNMYHWAKAFIVDEVLDRDEMFYSDIDDIY |
| | NILENIVPLYNRVRNYVTQKPYNSKKIKLNFQSPTLANGWSQSKEFDNN |
| | AIILIRDNKYYLAIFNAKNKPDKKIIQGNSDKKNDNDYKKMVYNLLPGA |
| | NKMLPKVFLSKKGIETFKPSDYIISGYNAHKHIKTSENFDISFCRDLIDYFK |
| | NSIEKHAEWRKYEFKFSATDSYNDISEFYREVEMQGYRIDWTYISEADIN |
| | KLDEEGKIYLFQIYNKDFAENSTGKENLHTMYFKNIFSEENLKDIIIKLNG |
| | QAELFYRRASVKNPVKHKKDSVLVNKTYKNQLDNGDVVRIPIPDDIYNE |
| | IYKMYNGYIKENDLSEAAKEYLDKVEVRTAQKDIVKDYRYTVDKYFIHT |
| | PITINYKVTARNNVNDMAVKYIAQNDDIHVIGIDRGERNLIYISVIDSHGN |
| | IVKQKSYNILNNYDYKKKLVEKEKTREYARKNWKSIGNIKELKEGYISG |
| | VVHEIAMLMVEYNAIIAMEDLNYGFKRGRFKVERQVYQKFESMLINKL |
| | NYFASKGKSVDEPGGLLKGYQLTYVPDNIKNLGKQCGVIFYVPAAFTSK |
| | IDPSTGFISAFNFKSISTNASRKQFFMQFDEIRYCAEKDMFSFGFDYNNFD |
| | TYNITMSKTQWTVYTNGERLQSEFNNARRTGKTKSINLTETIKLLLEDNE |
| | INYADGHDVRIDMEKMDEDKNSEFFAQLLSLYKLTVQMRNSYTEAEEQ |
| | EKGISYDKIISPVINDEGEFFDSDNYKESDDKECKMPKDADANGAYCIAL |
| | KGLYEVLKIKSEWTEDGFDRNCLKLPHAEWLDFIQNKRYE* |
| SEQ ID NO: | MNKDIRKNFTDFVGISEIQKTLRFILIPIGKTAQNIDKYNMFEDDEIRHEY |
| 24 | YPILKEACDDFYRNHIDQQFENLELDWSKLDEALASEDRDLINETRATYR |
| | QVLFNRLKNSVDIKGDSKKNKTLSLESSDKNLGKKKTKNTFQYNFNDLF |
| | KAKLIKAILPLYIEYIYEGEKLENAKKALKMYNRFTSRLSNFWQARANIF |
| | TDDEISTGSPYRLVNDNFTIFRINNSIYTKNKPFIEEDILEFEKKLKSKKIIK |
| | DFESVDDYFTVNAFNKLCTQNGIDKYNSILGGFTTKEREKVKGLNELFN |
| | LAQQSINKGKKGEYRKNIRLGKLTKLKKQILAISDSTSFLIEQIEDDQDLY |
| | NKIKDFFELLLKEEIENENIFTQYANLQKLIEQADLSKIYINAKHLNKISHQ |
| | VTGKWDSLNKGIALLLENININEESKEKSEVISNGQTKDISSEAYKRYLQI |
| | QSEEKDIERLRTQIYFSLEDLEKALDLVLIDENMDRSDKSILSYVQSPDLN |
| | VNFERDLTDLYSRIMKLEENNEKLLANHSAIDLIKEFLDLIMLRYSRWQI |
| | LFCDSNYELDQTFYPIYDAVMEILSNIIRLYNLARNYLSRKPDRMKKKKI |
| | NFNNPTLADGWSESKIPDNSSMLFIKDGMYYLGIIKNRAAYSELLEAESL |
| | QSSEKKKSENSSYERMNYHFLPDAFRSIPKSSIAMKAVKEHFEINQKTAD |
| | LLLDTDKFSKPLRITKEIFDMQYVDLHKNKKKYQVDYLRDTGDKKGYR |
| | KALNTWLNFCKDFISKYKGRNLFDYSKIKDADHYETVNEFYNDVDKYS |
| | YHIFFTSVAETTVEKFISEGKLYLFQLYNKDFSPHSTGKPNLHTIYWRALF |
| | SEENLTSKNIKLNGQAEIFFRPKQIETPFTHKKGSILVNRFDVNGNPIPINV |
| | YQEIKGFKNNVIKWDDLNKTTQEGLENDQYLYFESEFEIIKDRRYTEDQL |
| | FFHVPISFNWDIGSNPKINDLATQYIVNSNDIHIIGIDRGENHLIYYSVIDLQ |
| | GAIVEQGSLNTITEYTENKFLNNKTNNLRKIPYKDILQQREDERADARIK |
| | WHAIDKIKDLKDGYLGQIVHFLAKLIIKYNAIVILEDLNYGFKRGRFKVE |
| | RQVYQKFEMALMKKLNVLVFKDYDIDEIGGPLKPWQLTRPIDSYERMG |
| | RQNGILFYVPAAYTSAVDPVTGFANLFYLNNVKNSEKFHFFSKFESIKYH |
| | SDQDMFSFAFDYNNFGTTTRINDLSKSKWQVFTNHERSVWNNKEKNYV |
| | TQNLTDLIKKLLRTYNIEFKNNQNVLDSILKIENNTDKENFARELFRLFRL |
| | TIQLRNTTVNENNTEITENELDYIISPVKDKNGNFFDSRDELKNLPDNGD |
| | ANGAYNIARKGLLYIEQLQESIKTGKLPTLSISTLDWFNYIMK* |
| SEQ ID NO: | MNKGGYVIMEKMTEKNRWENQFRITKTIKEEIIPTGYTKVNLQRVNMLK |
| 25 | REMERNEDLKKMKEICDEYYRNMIDVSLRLEQVRTLGWESLIHKYRML |
| | NKDEKEIKALEKEQEDLRKKISKGFGEKKAWTGEQFIKKILPQYLMDHY |
| | TGEELEEKLRIVKKFKGCTMFLSTFFKNRENIFTDKPIHTAVGHRITSENA |
| | MLFAANINTYEKMESNVTLEIERLQREFWRRGINISEIFTDAYYVNVLTQ |
| | KQIEAYNKICGDINQHMNEYCQKQKLKFSEFRMRELKKQILAVVGEHFE |
| | IPEKIESTKEVYRELNEYYESLKELHGQFEELKSVQLKYSQIYVQKKGYD |
| | RISRYIGGQWDLIQECMKKDCASGMKGTKKNHDAKIEEEVAKVKYQSIE |
| | HIQKLVCTYEEDRGHKVTDYVDEFIVSVCDLLGADHIITRDGERIELPLQ |
| | YEPGTDLLKNDTINQRRLSDIKTILDWHMDMLEWLKTFLVNDLVIKDEE |
| | FYMAIEELNERMQCVISVYNRIRNYVTQKGYEPEKIRICFDKGTILTGWT |
| | TGDNYQYSGFLLMRNDKYYLGIINTNEKSVRKILDGNEECKDENDYIRV |
| | GYHLINDASKQLPRIFVMPKAGKKSEILMKDEQCDYIWDGYCHNKHNES |
| | KEFMRELIDYYKRSIMNYDKWEGYCFKFSSTESYDNMQDFYKEVREQS |
| | YNISFSYINENVLEQLDKDGKIYLFQVYNKDFAAGSTGTPNLHTMYLQN |
| | LFSSQNLELKRLRLGGNAELFYRPGTEKDVTHRKGSILVDRTYVREEKD |
| | GIEVRDTVPEKEYLEIYRYLNGKQKGDLSESAKQWLDKVHYREAPCDII |
| | KDKRYAQEKYFLHFSVEINPNAEGQTALNDNVRRWLSEEEDIHVIGIDR |
| | GERNLIYVSLMDGKGRIKDQKSYNIVNSGNKEPVDYLAKLKVREKERDE |
| | ARRNWKAIGKIKDIKTGYLSYVVHEIVEMAVREKAIIVMEDLNYGFKRG |
| | RFKVERQVYQKFEEMLINKLNYVVDKQLSVDEPGGLLRGYQLAFIPKDK |
| | KSSMRQNGIVFYVPAGYTSKIDPTTGFVNIFKFPQFGKGDDDGNGKDYD |
| | KIRAFFGKFDEIRYECDEKVTADNTREVKERYRFDFDYSKFETHLVHMK |
| | KTKWTVYAEGERIKRKKVGNYWTSEVISDIALRMSNTLNIAGIEYKDGH |
| | NLVNEICALRGKQAGIILNELLEIVRLTVQLRNSTTEGDVDERDEIISPVLN |
| | EKYGCFYHSTEYKQQNGDVLPKDADANGAYCIGLKGIYEIRQIKNKWK |
| | EDMTKGEGKALNEGMRISHDQWFEFIQNMNKGE* |
| SEQ ID NO: | MNNPRGAFGGFTNLYSLSKTLRFELKPYLEIPEGEKGKLFGDDKEYYKN |
| 26 | CKTYTEYYLKKANKEYYDNEKVKNTDLQLVNFLHDERIEDAYQVLKPV |
| | FDTLHEEFITDSLESAEAKKIDFGNYYGLYEKQKSEQNKDEKKKIDKPLE |
| | TERGKLRKAFTPIYEAEGKNLKNKAGKEKKDKDILKESGFKVLIEAGILK |
| | YIKNNIDEFADKKLKNNEGKEITKKDIETALGAENIEGIFDGFFTYFSGFN |
| | QNRENYYSTEEKATAVASRIVDENLSKFCDNILLYRKNENDYLKIFNFLK |
| | NKGKDLKLKNSKFGKENEPEFIPAYDMKNDEKSFSVADFVNCLSQGEIE |
| | KYNAKIANANYLINLYNQNKDGNSSKLSMFKILYKQIGCGEKKDFIKTIK |
| | DNAELKQILEKACEAGKKYFIRGKSEDGGVSNIFDFTDYIQSHENYKGVY |
| | WSDKAINTISGKYFANWDTLKNKLGDAKVENKNTGEDKADVKYKVPQ |
| | AVMLSELFAVLDDNAGEDWREKGIFFKASLFEGDQNKSEIIKNANRPSQ |
| | ALLKMICDDMESLAKNFIDSGDKILKISDRDYQKDENKQKIKNWLDNAL |
| | WINQILKYFKVKANKIKGDSIDARIDSGLDMLVFSSDNPAEDYDMIRNYL |
| | TQKPQDEINKLKLNFENSSLAGGWDENKEKDNSCIILKDEQDKQYLAVM |
| | KYENTKVFEQKNSQLYIADNAAWKKMIYKLVPGASKTLPKVFFSKKWT |
| | ANRPTPSDIVEIYQKGSFKKENVDFNDKKEKDESRKEKNREKIIAELQKT |
| | CWMDIRYNIDGKIESAKYVNKEKLAKLIDFYKENLKKYPSEEESWDRLF |
| | AFGFSDTKSYKSIDQFYIEVDKQGYKLEFVTINKARLDEYVRDGKIYLFEI |
| | RSRDNNLVNGEEKTSAKNLQTIYWNAAFGGDDNKPKLNGEAEIFYRPAI |
| | AENKLNKKKDKNGKEIIDGYRFSKEKFIFHCPITLNFCLKETKINDKLNA |
| | ALAKPENGQGVYFLGIDRGEKHLAYYSLVNQKGEILEQGTLNLPFLDKN |
| | GKSRSIKVEKKSFEKDSNGGIIKDKDGNDKIKIEFVECWNYNDLLDARAG |
| | DRDYARKNWTTIGTIKELKDGYISQVVRKIVDLSIYKNTETKEFREMPAF |
| | IVLEDLNIGFKRGRQKIEKQVYQKLELALAKKLNFLVDKKADIGEIGSVT |
| | KAIQLTPPVNNFGDMENRKQFGNMLYIRADYTSQTDPATGWRKSIYLKS |
| | GSESNVKEQIEKSFFDIRYESGDYCFEYRDRHGKMWQLYSSKNGVSLDR |
| | FHGERNNSKNVWESEKQPLNEMLDILFDEKRFDKSKSLYEQMFKGGVA |
| | LTRLPKEINKKDKPAWESLRFVIILIQQIRNTGKNGDDRNGDFIQSPVRDE |
| | KTGEHFDSRIYLDKEQKGEKADLPTSGDANGAYNIARKGIVVAEHIKRG |
| | FDKLYISDEEWDTWLAGDEIWDKWLKENRESLTKTRK* |
| SEQ ID NO: | MNYKTGLEDFIGKESLSKTLRNALIPTESTKIHMEEMGVIRDDELRAEKQ |
| 27 | QELKEIMDDYYRTFIEEKLGQIQGIQWNSLFQKMEETMEDISVRKDLDKI |
| | QNEKRKEICCYFTSDKRFKDLFNAKLITDILPNFIKDNKEYTEEEKAEKEQ |
| | TRVLFQRFATAFTNYFNQRRNNFSEDNISTAISFRIVNENSEIHLQNMRAF |
| | QRIEQQYPEEVCGMEEEYKDMLQEWQMKHIYSVDFYDRELTQPGIEYY |
| | NGICGKINEHMNQFCQKNRINKNDFRMKKLHKQILCKKSSYYEIPFRFES |
| | DQEVYDALNEFIKTMKKKEIIRRCVHLGQECDDYDLGKIYISSNKYEQIS |
| | NALYGSWDTIRKCIKEEYMDALPGKGEKKEEKAEAAAKKEEYRSIADID |
| | KIISLYGSEMDRTISAKKCITEICDMAGQISIDPLVCNSDIKLLQNKEKTTEI |
| | KTILDSFLHVYQWGQTFIVSDIIEKDSYFYSELEDVLEDFEGITTLYNHVR |
| | SYVTQKPYSTVKFKLHFGSPTLANGWSQSKEYDNNAILLMRDQKFYLGI |
| | FNVRNKPDKQIIKGHEKEEKGDYKKMIYNLLPGPSKMLPKVFITSRSGQE |
| | TYKPSKHILDGYNEKRHIKSSPKFDLGYCWDLIDYYKECIHKHPDWKNY |
| | DFHFSDTKDYEDISGFYREVEMQGYQIKWTYISADEIQKLDEKGQIFLFQI |
| | YNKDFSVHSTGKDNLHTMYLKNLFSEENLKDIVLKLNGEAELFFRKASI |
| | KTPIVHKKGSVLVNRSYTQTVGNKEIRVSIPEEYYTEIYNYLNHIGKGKLS |
| | SEAQRYLDEGKIKSFTATKDIVKNYRYCCDHYFLHLPITINFKAKSDVAV |
| | NERTLAYIAKKEDIHIIGIDRGERNLLYISVVDVHGNIREQRSFNIVNGYD |
| | YQQKLKDREKSRDAARKNWEEIEKIKELKEGYLSMVIHYIAQLVVKYN |
| | AVVAMEDLNYGFKTGRFKVERQVYQKFETMLIEKLHYLVFKDREVCEE |
| | GGVLRGYQLTYIPESLKKVGKQCGFIFYVPAGYTSKIDPTTGFVNLFSFK |
| | NLTNRESRQDFVGKFDEIRYDRDKKMFEFSFDYNNYIKKGTILASTKWK |
| | VYTNGTRLKKIVVNGKYTSQSMEVELTDAMEKMLQRAGIEYHDGKDL |
| | KGQIVEKGIEAEIIDIFRLTVQMRNSRSESEDREYDRLISPVLNDKGEFFDT |
| | ATADKTLPQDADANGAYCIALKGLYEVKQIKENWKENEQFPRNKLVQD |
| | NKTWFDFMQKKRYL* |
| SEQ ID NO: | MRISKTLSLRIVRPFYTPEVEAGIKAEKDKREAQGQTRSLDAKFFNELKK |
| 28 | KHSEIILSSEFYSLLSEVQRQLTSIYNHAMSNLYHKIIVEGEKTSTSKALSN |
| | IGYDECKAIFPSYMALGLRQKIQSNFRRRDLKNFRMAVPTAKSDKFPIPIY |
| | RQVDGSKGGFKISENDGKDFIVELPLVDYVAEEVKTAKGRFTKINISKPP |
| | KIKNIPVILSTLRRRQSGQWFSDDGTNAEIRRVISGEYKVSWIEIVRRTRF |
| | GKHDDWFVNMVIKYDKPEEGLDSKVVGGIDVGVSSPLVCALNNSLDRY |
| | FVKSSDIIAFNKRAMARRRTLLRQNKYKRSGHGSKNKLEPITVLTEKNER |
| | FKKSIMQRWAKEVAEFFRGKGASVVRMEELSGLKEKDNFFSSYLRMYW |
| | NYGQLQQIIENKLKEYGIKVNYVSPKDTSKKCHSCTHINEFFTFEYRQKN |
| | NFPLFKCEKCGVECSADYNAAKNMAIA |
| SEQ ID NO: | MRTMVTFEDFTKQYQVSKTLRFELIPQGKTLENMKRDGIISVDRQRNED |
| 29 | YQKAKGILDKLYKYILDFTMETVVIDWEALATATEEFRKSKDKKTYEKV |
| | QSKIRTALLEHVKKQKVGTEDLFKGMFSSKIITGEVLAAFPEIRLSDEENL |
| | ILEKFKDFTTYFTGFFENRKNVFTDEALSTSFTYRLVNDNFIKFFDNCIVF |
| | KNVVNISPHMAKSLETCASDLGIFPGVSLEEVFSISFYNRLLTQTGIDQFN |
| | QLLGGISGKEGEHKQQGLNEIINLAMQQNLEVKEVLKNKAHRFTPLFKQI |
| | LSDRSTMSFIPDAFADDDEVLSAVDAYRKYLSEKNIGDRAFQLISDMEAY |
| | SPELMRIGGKYVSVLSQLLFYSWSEIRDGVKAYKESLITGKKTKKELENI |
| | DKEIKYGVTLQEIKEALPKKDIYEEVKKYAMSVVKDYHAGLAEPLPEKI |
| | ETDDERASIKHIMDSMLGLYRFLEYFSHDSIEDTDPVFGECLDTILDDMN |
| | ETVPLYNKVRNFSTRKVYSTEKFKLNFNNSSLANGWDKNKEQANGAILL |
| | RKEGEYFLGIFNSKNKPKLVSDGGAGIGYEKMIYKQFPDFKKMLPKCTIS |
| | LKDTKAHFQKSDEDFTLQTDKFEKSIVITKQIYDLGTQTVNGKKKFQVD |
| | YPRLTGDMEGYRAALKEWIDFGKEFIQAYTSTAIYDTSLFRDSSDYPDLP |
| | SFYKDVDNICYKLTFEWIPDAVIDDCIDDGSLYLFKLHNKDFSSGSIGKPN |
| | LHTLYWKALFEEENLSDVVVKLNGQAELFYRPKSLTRPVVHEEGEVIIN |
| | KTTSTGLPVPDDVYVELSKFVRNGKKGNLTDKAKNWLDKVTVRKMPH |
| | AITKDRRFTVDKFFFHVPITLNYKADSSPYRFNDFVRQYIKDCSDVKIIGI |
| | DRGERNLIYAVVIDGKGNIIEQRSFNTVGTYNYQEKLEQKEKERQTARQ |
| | DWATVTKIKDLKKGYLSAVVHELSKMIVKYKAIVALENLNVGFKRMRG |
| | GIAERSVYQQFEKALIDKLNYLVFKDEEQSGYGGVLNAYQLTDKFESFS |
| | KMGQQTGFLFYVPAAYTSKIDPLTGFINPFSWKHVKNREDRRNFLNLFS |
| | KLYYDVNTHDFVLAYHHSNKDSKYTIKGNWEIADWDILIQENKEVFGK |
| | TGTPYCVGKRIVYMDDSTTGHNRMCAYYPHTELKKLLSEYGIEYTSGQD |
| | LLKIIQEFDDDKLVKGLFYIIKAALQMRNSNSETGEDYISSPIEGRPGICFD |
| | SRAEADTLPYDADANGAFHIAMKGLLLTERIRNDDKLAISNEEWLNYIQ |
| | EMRG* |
| SEQ ID NO: | MSKLEKFTNCYSLSKTLRFKAIPVGKTQENIDNKRLLVEDEKRAEDYKG |
| 30 | VKKLLDRYYLSFINDVLHSIKLKNLNNYISLFRKKTRTEKENKELENLEIN |
| | LRKEIAKAFKGNEGYKSLFKKDIIETILPEFLDDKDEIALVNSFNGFTTAFT |
| | GFFDNRENMFSEEAKSTSIAFRCINENLTRYISNMDIFEKVDAIFDKHEVQ |
| | EIKEKILNSDYDVEDFFEGEFFNFVLTQEGIDVYNAIIGGFVTESGEKIKGL |
| | NEYINLYNQKTKQKLPKFKPLYKQVLSDRESLSFYGEGYTSDEEVLEVFR |
| | NTLNKNSEIFSSIKKLEKLFKNFDEYSSAGIFVKNGPAISTISKDIFGEWNV |
| | IRDKWNAEYDDIHLKKKAVVTEKYEDDRRKSFKKIGSFSLEQLQEYADA |
| | DLSVVEKLKEIIIQKVDEIYKVYGSSEKLFDADFVLEKSLKKNDAVVAIM |
| | KDLLDSVKSFENYIKAFFGEGKETNRDESFYGDFVLAYDILLKVDHIYDA |
| | IRNYVTQKPYSKDKFKLYFQNPQFMGGWDKDKETDYRATILRYGSKYY |
| | LAIMDKKYAKCLQKIDKDDVNGNYEKINYKLLPGPNKMLPKVFFSKKW |
| | MAYYNPSEDIQKIYKNGTFKKGDMFNLNDCHKLIDFFKDSISRYPKWSN |
| | AYDFNFSETEKYKDIAGFYREVEEQGYKVSFESASKKEVDKLVEEGKLY |
| | MFQIYNKDFSDKSHGTPNLHTMYFKLLFDENNHGQIRLSGGAELFMRRA |
| | SLKKEELVVHPANSPIANKNPDNPKKTTTLSYDVYKDKRFSEDQYELHIP |
| | IAINKCPKNIFKINTEVRVLLKHDDNPYVIGIDRGERNLLYIVVVDGKGNI |
| | VEQYSLNEIINNFNGIRIKTDYHSLLDKKEKERFEARQNWTSIENIKELKA |
| | GYISQVVHKICELVEKYDAVIALEDLNSGFKNSRVKVEKQVYQKFEKML |
| | IDKLNYMVDKKSNPCATGGALKGYQITNKFESFKSMSTQNGFIFYIPAW |
| | LTSKIDPSTGFVNLLKTKYTSIADSKKFISSFDRIMYVPEEDLFEFALDYK |
| | NFSRTDADYIKKWKLYSYGNRIRIFRNPKKNNVFDWEEVCLTSAYKELF |
| | NKYGINYQQGDIRALLCEQSDKAFYSSFMALMSLMLQMRNSITGRTDV |
| | DFLISPVKNSDGIFYDSRNYEAQENAILPKNADANGAYNIARKVLWAIGQ |
| | FKKAEDEKLDKVKIAISNKEWLEYAQTSVKH |
| SEQ ID NO: | MTNFDNFTKKYVNSKTIRLEAIPVGKTLKNIEKMGFIAADRQRDEDYQK |
| 31 | AKSVIDHIYKAFMDDCLKDLFLDWDPLYEAVVACWRERSPEGRQALQI |
| | MQADYRKKIADRFRNHELYGSLFTKKIFDGSVAQRLPDLEQSAEEKSLLS |
| | NFNKFTSYFRDFFDKRKRLFSDDEKHSAIAYRLINENFLKFVANCEAFRR |
| | MTERVPELREKLQNTGSLQVYNGLALDEVFSADFYNQLIVQKQIDLYNQ |
| | LIGGIAGEPGTPNIQGLNATINLALQGDSSLHEKLAGIPHRFNPLYKQILSD |
| | VSTLSFVPSAFQSDGEMLAAVRGFKVQLESGRVLQNVRRLENGLETEAD |
| | LSRVYVNNSKLAAFSSMFFGRWNLCSDALFAWKKGKQKKITNKKLTEI |
| | KKWLKNSDIAIAEIQEAFGEDFPRGKINEKIQAQADALHSQLALPIPENLK |
| | ALCAKDGLKSMLDTVLGLYRMLQWFIVGDDNEKDSDFYFGLGKILGSL |
| | DPVLVLYNRVRNYITKKPYSLTKFRLNFDNSQLLNGWDENNLDTNCASI |
| | FIKDGKYYLGISNKNNRPQFDTVATSGKSGYQRMVYKQFANWGRDLPH |
| | STTQMKKVKKHFSASDADYVLDGDKFIRPLIITKEIFDLNNVKFNGKKKL |
| | QVDYLRNTGDREGYTHALHTWINFAKDFCACYKSTSIYDISCLRPTDQY |
| | DNLMDFYADLGNLSHRIVWQTIPEEAIDNYVEQGQLFLFQLYNKDFAPG |
| | ADGKPNLHTLYWKAVFNPENLEDVVVKLNGKAELFYRPRSNMDVVRH |
| | KVGEKLVNRKLKNGLTLPSRLHEEIYRYVNGTLNKDLSADARSVLPLAV |
| | VRDVQHEIIKDRRFTADKFFFHASLTFNFKSSDKPVGFNEDVREYLREHP |
| | DTYVVGVDRGERNLIYIVVIDPQGNIVEQRSFNMINGIDYWSLLDQKEKE |
| | RVEAKQAWETVGKIKDLKCGYLSFLIHEITKIIIKYHAVVILENLSLGFKR |
| | VRTGIAEKAVYQQFERMLVTKLGYVVFKDRAGKAPGGVLNAYQLTDN |
| | TRTAENTGIQNGFLFYVPAAFTSRVDPATGFFDFYDWGKIKTATDKKNFI |
| | AGFNSVRYERSTGDFIVHVGAKNLAVRRVAEDVRTEWDIVIEANVRKM |
| | GIDGNSYISGKRIRYRSGEQGHGQYENHLPCQELIRALQQYGIQYETGKD |
| | ILPAILQQDDAKLTDTVFDVFRLALQMRNTSAETGEDYFNSVVRDRSGR |
| | CFDTRRAEAAMPKEADANDAYHIALKGLFVLEKLRKGESIGIKNTEWLR |
| | YVQQRHS* |
| SEQ ID NO: | MTPIFCNFVVYQIMLFNNNININVKTMNKKHLSDFTNLFPVSKTLRFRLE |
| 32 | PQGKTMENIVKAQTIETDEERSHDYEKTKEYIDDYHRQFIDDTLDKFAFK |
| | VESTGNNDSLQDYLDAYLSANDNRTKQTEEIQTNLRKAIVSAFKMQPQF |
| | NLLFKKEMVKHLLPQFVDTDDKKRIVAKFNDFTTYFTGFFTNRENMYSD |
| | EAKSTSIAYRIVNQNLIKFVENMLTFKSHILPILPQEQLATLYDDFKEYLN |
| | VASIAEMFELDHFSIVLTQRQIEVYNSVIGGRKDENNKQIKPGLNQYINQ |
| | HNQAVKDKSARLPLLKPLFNQILSEKAGVSFLPKQFKSASEVVKSLNEAY |
| | AELSPVLAAIQDVVTNITDYDCNGIFIKNDLGLTDIAQRFYGNYDAVKRG |
| | LRNQYELETPMHNGQKAEKYEEQVAKHLKSIESVSLAQINQVVTDGGDI |
| | CDYFKAFGATDDGDIQRENLLASINNAHTAISPVLNKENANDNELRKNT |
| | MLIKDLLDAIKRLQWFAKPLLGAGDETNKDQVFYGKFEPLYNQLDETIS |
| | PLYDKVRSYLTKKPYSLDKFKINFEKSNLLGGWDPGADRKYQYNAVILR |
| | KDNDFYLGIMRDEATSKRKCIQVLDCNDEGLDENFEKVEYKQIKPSQNM |
| | PRCAFAKKECEENADIMELKRKKNAKSYNTNKDDKNALIRHYQRYLDR |
| | TYPEFGFVYKDADEYDTVKAFTDSMDSQDYKLSFLQVSETGLNKLVDE |
| | GDLYLFKITNKDFSSYAKGRPNLHTIYWRMLFDPKNLANVVYKLEGKA |
| | EVFFRRKSLASTTTHKAKQAIKNKSRYNEAVKPQSTFDYDIIKDRRFTAD |
| | KFEFHVPIKMNFKAAGWNSTRLTNEVREFIKSQGVRHIIGIDRGERHLLY |
| | LTMIDMDGNIVKQCSLNAPAQDNARASEVDYHQLLDSKEADRLAARRN |
| | WGTIENIKELKQGYLSQVVHLLATMMVDNDAILVLENLNAGFMRGRQK |
| | VEKSVYQKFEKMLIDKLNYIVDKGQSPDKPTGALHAVQLTGLYSDFNKS |
| | NMKRANVRQCGFVFYIPAWNTSKIDPVTGFVNLFDTHLSSMGEIKAFFS |
| | KFDSIRYNQDKGWFEFKFDYSRFTTRAEGCRTQWTVCTYGERIWTHRSK |
| | NQNNQFVNDTVNVTQQMLQLLQDCGIDPNGNLKEAIANIDSKKSLETLL |
| | HLFKLTVQMRNSVTGSEVDYMISPVADERGHFFDSRESDEHLPANADAN |
| | GAFNIARKGLMVVRQIMATDDVSKIKFAVSNKDWLRFAQHIDD* |
| SEQ ID NO: | VKISKTLSLRIIRPYYTPEVESAIKAEKDKREAQGQTRNLDAKFFNELKKK |
| 33 | HPQIILSGEFYSLLFEMQRQLTSIYNRAMSSLYHKIIVEGEKTSTSKALSDI |
| | GYDECKSVFPSYIALGLRQKIQSNFRRKELKGFRMAVPTAKSDKFPIPIYK |
| | QVDDGKGGFKISENKEGDFIVELPLVEYTAEDVKTAKGKFTKINISKPPKI |
| | KNIPVILSTLRRKQSGQWFSDEGTNAEIRRVISGEYKVSWIEVVRRTRFG |
| | KHDDWFLNIVIKYDKTEDGLDPEVVGGIDVGVSTPLVCAVNNSLDRYFV |
| | KSSDIIAFKKRAMARRRTLLRQNRFKRSGHGSKSKLEPITILTEKNERFKK |
| | SIMQRWAKEVAEFFKGERASVVQMEELSGLKEKDNFFGSYLRMYWNY |
| | GQLQQIIENKLKEYGIKVNYVSPKDTSKKCHSCGYINEFFTFEFRQKNNFP |
| | LFKCKKCGVECNADYNAAKNIAIA |
| SEQ ID NO: | MLKSYDYFTKLYSLQKTLRFELKPIGKTLEHIKNSGIIESDETLEEQYAIV |
| 34 | KNIIDKLHRKHIDEALSLVDFTKHLDTLKTFQELYLKRGKTDKEKEELEK |
| | LSADLRKLIVSYLKGNVKEKTQHNLNPIKERFEILFGKELFTNEEFFLLAE |
| | NEKEKKAIQAFKGFTTYFKGFQENRKNMYSEEGNSTSIAYRIINENLPLFI |
| | ENIARFQKVMSTIEKTTIKKLEQNLKTELKKHNLPGIFTIEYFNNVLTQEG |
| | ISRYNTIIGGKTTHEGVKIQGLNEIINLYNQQSKDVKLPILKPLHKQILSEE |
| | YSTSFKIKAFENDNEVLKAIDTFWNEHIEKSIHPVTGNKFNILSKIENLCD |
| | QLQKYKDKDLEKLFIERKNLSTVSHQVYGQWNIIRDALRMHLEMNNKN |
| | IKEKDIDKYLDNDAFSWKEIKDSIKIYKEHVEDAKELNENGIIKYFSAMSI |
| | NEEDDEKEYSISLIKNINEKYNNVKSILQEDRTGKSDLHQDKEKVGIIKEF |
| | LDSLKQLQWFLRLLYVTVPLDEKDYEFYNELEVYYEALLPLNSLYNKVR |
| | NYMTRKPYSVEKFKLNFNSPTLLDGWDKNKETANLSIILRKNGKYYLGI |
| | MNKENNTIFEYYPGTKSNDYYEKMIYKLLPGPNKMLPKVFFSKKGLEYY |
| | NPPKEILNIYEKGEFKKDKSGNFKKESLHTLIDFYKEAIAKNEDWEVFNF |
| | KFKNTKEYEDISQFYRDVEEQGYLITFEKVDANYVDKLVKEGKLYLFQI |
| | YNKDFSENKKSKGNPNLHTIYWKGLYDSENLKNVVYKLNGEAEVFYRK |
| | KSIDYPEEIYNHGHHKEELLGKFNYPIIKDRRYTQDKFLFHVPITMNFISK |
| | EEKRVNQLACEYLSATKEDVHIIGIDRGERHLLYLSLIDKEGNIKKQLSLN |
| | TIKNENYDKEIDYRVKLDEKEKKRDEARKNWDVIENIKELKEGYMSQVI |
| | HIIAKMMVEEKAILIMEDLNIGFKRGRFKVEKQVYQKFEKMLIDKLNYL |
| | VFKNKNPLEPGGSLNAYQLTSKFDSFKKLGKQSGFIFYVPSAYTSKIDPTT |
| | GFYNFIQVDVPNLEKGKEFFSKFEKIIYNTKEDYFEFHCKYGKFVSEPKN |
| | KDNDRKTKESLTYYNAIKDTVWVVCSTNHERYKIVRNKAGYYESHPVD |
| | VTKNLKDIFSQANINYNEGKDIKPIIIESNNAKLLKSIAEQLKLILAMRYN |
| | NGKHGDDEKDYILSPVKNKQGKFFCTLDGNQTLPINADANGAYNIALKG |
| | LLLIEKIKKQQGKIKDLYISNLEWFMFMMSR |
| SEQ ID NO: | MIKNPSNRHSLPKVIISEVDHEKILEFKIKYEKLARLDRFEVKAMHYEGK |
| 88 | EIVFDEVLVNGGLIEVEYQDDNKTLFVKVGEKSYSIRGKKVGGKQRLLE |
| | DRVSKTKVQLELSDGVVDNKGNLRKSRTERELIVADNIKLYSQIVGREV |
| | TTTKEIYLVKRFLAYRSDLLFYYSFVDNFFKVAGNEKELWKINFDDATS |
| | AQFMGYIPFMVNDNLKNDNAYLKDYVRNDVQIKDDLKKVQTIFSALRH |
| | TLLHFNYEFFEKLFNGEDVGFDFDIGFLNLLIENIDKLNIDAKKEFIDNEKI |
| | RLFGENLSLAKVYRLYSDICVNRVGFNKFINSMLIKDGVENQVLKAEFN |
| | RKFGGNAYTIDIHSNQEYKRIYNEHKKLVIKVSTLKDGQAIRRGNKKISE |
| | LKEQMKSMTKKNSLARLECKMRLAFGFLYGEYNNYKAFKNNFDTNIKN |
| | SQFDVNDVEKSKAYFLSTYERRKPRTREKLEKVAKDIESLELKTVIANDT |
| | LLKFILLMFVFMPQELKGDFLGFVKKYYHDVHSIDDDTKEQEEDVVEA |
| | MSTSLKLKILGRNIRSLTLFKYALSSQVNYNSTDNIFYVEGNRYGKIYKK |
| | LGISHNQEEFDKTLVVPLLRYYSSLFKLMNDFEIYSLAKANPTAVSLQEL |
| | VDDETSPYKQGNYFNFNKMLRDIYGLTSDEIKSGQVVFMRNKIAHFDTE |
| | VLLSKPLLGQTKMNLQRKDIVSFIEARGDIKELLGYDAINDFRMKVIHLR |
| | TKMRVYSDKLQTMMDLLRNAKTPNDFYNVYKVKGVESINKHLLEVLA |
| | QTAEERTVEKQIRDGNEKYDL |
| SEQ ID NO: | LNSIEKIKKPSNRNSIPSIIISDYDENKIKEIKVKYLKLARLDKITIQDMEIRD |
| 89 | NIVEFKKILLNGIEHTIKDNQKIEFDNYEITAYVRASKQRRDGKITQAKYV |
| | VTITDKYLRDNEKEKRFKSTERELPNDTLLMRYKQISGFDTLTSKDIYKIK |
| | RYIDFKNEMLFYFQFIEEFFSPLLPKGTNFYSLNIEQNKDKVVKYIVYRLN |
| | DDFKNQSLNQFIKKTDTIKYDFLKIQKILSDFRHALAHFDFDFIQKFFDDE |
| | LDKNRFDISTISLIKTMLQEKEEKYYQEKNNYIEDSDTLTLFDEKESNFSK |
| | IHNFYIKISQKKPAFNKLINSFLSKDGVPNEELKSYLATKKIDFFEDIHSNK |
| | EYKKIYIKHKNLVVEKQKEESQEKPNGQKLKNYNDELQKLKDEMNKIT |
| | KQNSLNRLEVKLRLAFGFIANEYNYNFKNFNDKFTLDVKKEQKIKVFKN |
| | SSNEKLKEYFESTFIEKRFFHFCVKFFNKKTKKEETKQKNIFNLIENETLEE |
| | LVKESPLLQIITLLYLFIPKELQGEFVGFILKIYHHTKNITNDTKEDEKSIED |
| | TQNSFSLKLKILAKNLRGLQLFNYSLSHNTLYNTKEHFFYEKGNRWQSV |
| | YKSLEISHNQDEFDIHLVIPVIKYYINLNKLIGDFEIYALLTYADKNSITEK |
| | LSDITKRDDLKFRGYYNFSTLLFKTFMINTNYEQNQKSTQYIKQTRNDIA |
| | HQNIENMLKAFENNEIFAQREEIVNYLQKEHKMQEILHYNPINDFTMKT |
| | VQYLKSLNIHSQKESKIADIHKKESLVPNDYYLIYKLK VIELLKQKVIEAI |
| | GETKDEEKIKNAIAKEEQIKKGYNK |
| SEQ ID NO: | MLKHKRKNKNSLARVVLSNYDSNNIYEIKIKYEKLAKLDKINIIEMDYD |
| 90 | ADNNVMFKKVLFNNKEIDLSHKDKTKINIELDNKKYNISAKKQIGKTHL |
| | VVRNKQTSKISRIKKIQDTYYRGKDVFILDNNIEILDKKQTKDKFIVTLND |
| | ITNNKTTSTEAELIDDTKDIFKKISAKKDLKSSDIYKIKRFISIRSNFSFYYT |
| | FVDNYFKIFHAKKDKNKEELYKIKFKDEINIKPYLENILDNMKNKNGILY |
| | NYANDRKKVLNDLRNIQYVFKEFRHKLAHFDYNFLDNFFSNSVEEKYK |
| | QKVNEIKLLDILLDNIDSLNVVPKQNYIEDETISVFDAKDIKLKRLYTYYI |
| | KLTINYPGFKKLINSFFIQDGIENQELKEYINNKEKDTQVLKELDNKAYY |
| | MDISQYRKYKNIYNKHKELVSEKELSSDGKKINSLNQKINKLKIDMKNIT |
| | KPNALNRLIYRLRVAFGFIYKEYATINNFNKSFLQDTKTKRFENISQQDIK |
| | SYLDISYQDKGKFFVKSKKTFKNKTTVKYTFEDLDLTLNEIITQDDIFVK |
| | VIFLFSIFMPKELNGDFFGFINMYYHKMKNISYDTKDIDMLDTISQNMKL |
| | KILEQNIKKTYVFKYYLDLDSSIYSKLVQNIKITEDIDSKKYLYAKIFKYY |
| | QHLYKLISDVEIYLLYKYNSKENLSITIDKDELKHRGYYNFQSLLIKNNIN |
| | KDDAYWSIVNMRNNLSHQNIDELVGHFCKGCLRKSTTDIAELWLRKDIL |
| | TITNEIINKIESFKDIKITLGYDCVNDFTQKVKQYKQKLKASNERLAKKIE |
| | EKQNQVVDEKNKEELEKNILNMKNIQKINRYILDIL |
| SEQ ID NO: | MLKHKRKNKNSLARVVLSNYDSNNIYEIKIKYEKLAKLDKINIIEMDYD |
| 91 | ADNNVMFKKVLFNNKEIDLSHKDKTKINIELDNKKYNISAKKQIGKTHL |
| | VVRDKQTSKISRIKKIQDTYYRGKDVFILDNNIEILDKKQTKDKFIVTLND |
| | ITNDKTTSTEAELIDDTKDIFKKISAKKDLKSSDIYKIKRFISIRSNFSFYYT |
| | FVDNYFKIFHAKKDKNKEELYKIKFKDEINIKPYLENILDNMKNKNGILY |
| | DYADDREKVLNDLKNIQYVFTEFRHKLAHFDYNFLDNFFSNSVTDQYK |
| | QKVNEIKLLDILLDNIDSLNVVPKQNYIEDETISVFDAKDIKLKRLYTYYI |
| | KLTINYPGFKKLINSFFIQDGIENQELKEYINNKEKDTQVLKELDNKAYY |
| | MDISQYRKYKNIYNKHKELVSEKELSSDGQKINSLNQKINKLKIEMKNIT |
| | KPNALNRLIYRLRVAFGFIYKEYATINNFNKSFLQDTKIKRFENISQQDIK |
| | NYLDISYQDKGKFFVKSKKTFKNKTTIKYTFEDLDLTLNEIITQDDIFVKV |
| | IFLFSIFMPKELNGDFFGFINMYYHKMKNISYDTKDIDMLDTISQNMKLKI |
| | LEQNIKKTYVFKYYLDLDSSIYSKLVQNIKITEDIDSKKYLYAKIFKYYQH |
| | LYKLISDVEIYLLYKYNSKENLSITIDKDELKHRGYYNFQSLLIKNNINKD |
| | DAYWSIVNMRNNLSHQNIDELVGHFCKGCLRKSTTDIAELWLRKDILTIT |
| | NEIINKIESFKDIKITLGYDCVNDFTQKVKQYKQKLKASNERLAKKIEEK |
| | QNQVVDEKNKEELEKKILNMKNIQKINRYILDIL |
| SEQ ID NO: | MSQLKNPSNKNSLPRIIISDFNEIKINEIKIKYHKLDRLDKIIVKEMEIINNKI |
| 92 | FFKKILFNNQIKDINSENIELENYILAGEVKPSNTKIILNRDGKEKSFIVYD |
| | GFTFKYKPNDKRISETKTNAKYILTIKDKTRHRESSTQRDILKSSIIETYKQ |
| | ISGFENITSKDIYTIKRYIDFKNEMMFYYTFIDDFFFPITGKNKQDKKNNF |
| | YNYKIKENAKKFISLINYRINDDFKNKNGILYDYLSNKEEIIINDFIHIQTIL |
| | KDVRHAIAHFNFDFIQKLFDNEQAFNSKFDGIEILNILFNQKQEKYFEAQT |
| | NYIEEETIKILDEKELSFKKLHSFYSQICQKKPAFNKLINSFIIQDGIENKEL |
| | KDYISQKYNSKFDYYLDIHTCKIYKDIYNQHKKFVADKQFLENQKTDGQ |
| | KIKKLNDQINQLKTKMNNLTKKNSLKRLEIKFRLAFGFIFTEYQTFKNFN |
| | ERFIEDIKANKYSTKIELLDYGKIKEYISITHEEKRFFNYKTFNKKTNKNIN |
| | KTIFQSLEKETFENLVKNDNLIKMMFLFQLLLPRELKGEFLGFILKIYHDL |
| | KNIDNDTKPDEKSLSELNISTALKLKILVKNIRQINLFNYTISNNTKYEEKE |
| | KRFYEEGNQWKDIYKKLYISHDFDIFDIHLIIPIIKYNINLYKLIGDFEVYLL |
| | LKYLERNTNYKTLDKLIEAEELKYKGYYNFTTLLSKAINIALNDKEYHNI |
| | THLRNNTSHQDIQNIISSFKNNKLLEQRENIIELISKESLKKKLHFDPINDFT |
| | MKTLQLLKSLEVHSDKSEKIENLLKKEPLLPNDVYLLYKLKGIEFIKKELI |
| | SNIGITKYEEKIQEKIAKGVEK |
| SEQ ID NO: | MVKNPANRHALPKVIISEVDNNNILEFKIKYEKLARLDKVEVKSMHFDN |
| 93 | NKQVVFDEVVINGGLIEPTYEDKHKKLVVTAGEKSYSIVGQKVGGKPRL |
| | LEDRVSKTKVQLELTNYVEDKEGKKRVSKTERELIVADNIELYSQIVGRE |
| | VKTTKEIYLIKRFLEYRSDLLFYYGFVDNFFKVAGNGKELWKIDFTNSDS |
| | LHLIEYFKFSINDNLKNDENYLKNYVSDNTKIENDLVKCQNNFNSLRHA |
| | LMHFDYDFFEKLFNGEDVGFDFDIEFLNIMIDKVDKLNIDTKKEFIDDEE |
| | VTLFGEALSLKKLYGLFSHIAINRVAFNKLINSFIIEDGIENKELKDFFNNK |
| | KESQAYEIDIHSNAEYKALYVQHKKLVMATSAMTDGDEIAKKNQEISDL |
| | KEKMKVITKENSLARLEHKLRLAFGFIYTEYKDYKTFKKHFDQDIKGAK |
| | YKGLNVEKLKEYYETTLKNSKPKTDEKLEDVAKKIDKLSLKELIDDDTL |
| | LKFVLLLFIFMPQELKGDFLGFIKKYYHDKKHIDQDTKDKDTEIEELSTG |
| | LKLKVLDKNIRSLSILKHSFSFQVKYNRKDKNFYEDGNLHGKFYKKLSIS |
| | HNQEEFNKSVYAPLFRYYSALYKLINDFEIYALAQHVENHETLADQVNK |
| | SQFIQKSYFNFRKLLDNTDSISQSSSYNTLIVMRNDISHLSYEPLFNYPLDE |
| | RKSYKKKTQKGVKTFHVELLYISRAKIIELISLQTDMKKLLGYDAVNDEN |
| | MKVVHLRKRLSVYANKEESIRKMQADAKTPNDFYNIYKVKGVESINQH |
| | LLKVIGVTEAEKSIEKQINEGNKKHNT |
| SEQ ID NO: | MTKKPSNRNSLPKVIINKVDESSILEFKIKYEKLARLDRFEVRSMRYDGD |
| 94 | GRIIFDEVVANAGLLDVDYEDDNRTIVVKIENKAYNIYGKKVGGEKRLN |
| | GKISKAKVQLILTDSIRKNANDTHRHSLTERELINKNEVDLYSKIAEREIS |
| | TTKDIYLVKRFLAYRSDLLLYYAFINHYVRVNGNKKEFWKTEIDDKIIDY |
| | FIYTINDTLKNKEGYLEKYIVDRDQIKKDLEKIKQIFSHLRHKLMHYDFRF |
| | FTDLFDGKDVDIKVDNSIQKISELLDIEFLNIVIDKLEKLNIDAKKEFIDDE |
| | KITLFGQEIELKKLYSLYAHTSINRVAFNKLINSFLIKDGVENKELKEYFN |
| | AHNQGKESYYIDIHQNQEYKKLYIEHKNLVAKLSATTDGKEIAKINRELA |
| | DKKEQMKQITKANSLKRLEYKLRLAFGFIYTEYKDYERFKNSFDTDTKK |
| | KKFDAIDNAKIIEYFEATNKAKKIEKLEEILKGIDKLSLKTLIQDDILLKFL |
| | LLFFTFLPQEIKGEFLGFIKKYYHDITSLDEDTKDKDDEITELPRSLKLKIFS |
| | KNIRKLSILKHSLSYQIKYNKKESSYYEAGNVFNKMFKKQAISHNLEEFG |
| | KSIYLPMLKYYSALYKLINDFEIYALYKDMDTSETLSQQVDKQEYKRNE |
| | YFNFETLLRKKFGNDIEKVLVTYRNKIAHLDFNFLYDKPINKFISLYKSRE |
| | KIVNYIKNHDIQAVLKYDAVNDFVMKVIQLRTKLKVYADKEQTIESMIQ |
| | NTQNPNGFYNIYKVKAVENINRHLLKVIGYTESEKAVEEKIRAGNTSKS |
| SEQ ID NO: | MIKNPSNRYALPKVIISKIDNQNILEFKIKYKKLSKLDIVKVKSMHYDDR |
| 95 | AIIFDEVIVNDGLIDVEYRDNHKTIFVKVGNKSYSISGQKVGGKERLLEN |
| | RVSKTKVQLELKDKATNRVSKTERELIVDDNIKIYSQIVGRDVKTTKDIY |
| | LIKRFLAYRSDLLFYYGFVNNFFHVANNRSEFWKIDFNDSNNSKLIEYFK |
| | FTINDHLKNDENYLKDYISDNEKLKNDLIKVKNSFEKIRHALMHFDYDFF |
| | VKLFNGEDVGLELDIEFLDIMIDKLDKLNIDTKKEFIDDEKITIFGEELSLA |
| | KLYRFYAHTAINRVAFNKLINSFIIENGVENQSLKEYFNQQAGGIAYEIDI |
| | HQNREYKNLYNEHKKLVSRVLSISDGQEIAILNQKIAKLKDQMKQITKA |
| | NSIKRLEYKLRLALGFIYTEYENYEEFKNNFDTDIKNGRFTPKDNDGNKR |
| | AFDSRELEQLKGYYEATIQTQKPKTDEKIEEVSKKIDRLSLKSLIADDILL |
| | KFILLMFTFMPQELKGEFLGFIKKYYHDTKHIDQDTISDSDDTIETLSIGLK |
| | LKILDKNIRSLSILKHSLSFQTKYNKKDRNYYEDGNIHGKFFKKLGISHNQ |
| | EEFNKSVYAPLFRYYSALYKLINDFEIYTLSLHIVGSETLTDQVNKSQFLS |
| | GRYFNFRKLLTQSYHINNNSTHSTIFNAVINMRNDISHLSYEPLFDCPLNG |
| | KKSYKRKIRNQFKTINIKPLVESRKIIIDFITLQTDMQKVLGYDAVNDFTM |
| | KIVQLRTRLKAYANKEQTIQKMITEAKTPNDFYNIYKVQGVEEINKYLLE |
| | VIGETQAEKEIREKIERGNIANF |
| SEQ ID NO: | MKKSIFDQFVNQYALSKTLRFELKPVGETGRMLEEAKVFAKDETIKKKY |
| 96 | EATKPFFNKLHREFVEEALNEVELAGLPEYFEIFKYWKRYKKKFEKDLQ |
| | KKEKELRKSVVGFFNAQAKEWAKKYETLGVKKKDVGLLFEENVFAILK |
| | ERYGNEEGSQIVDESTGKDVSIFDSWKGFTGYFIKFQETRKNFYKDDGTA |
| | TALATRIIDQNLKRFCDNLLIFESIRDKIDFSEVEQTMGNSIDKVFSVIFYSS |
| | CLLQEGIDFYNCVLGGETLPNGEKRQGINELINLYRQKTSEKVPFLKLLD |
| | KQILSEKEKFMDEIENDEALLDTLKIFRKSAEEKTTLLKNIFGDFVMNQG |
| | KYDLAQIYISRESLNTISRKWTSETDIFEDSLYEVLKKSKIVSASVKKKDG |
| | GYAFPEFIALIYVKSALEQIPTEKFWKERYYKNIGDVLNKGFLNGKEGV |
| | WLQFLLIFDFEFNSLFEREIIDENGDKKVAGYNLFAKGFDDLLNNFKYDQ |
| | KAKVVIKDFADEVLHIYQMGKYFAIEKKRSWLADYDIDSFYTDPEKGYL |
| | KFYENAYEEIIQVYNKLRNYLTKKPYSEDKWKLNFENPTLADGWDKNK |
| | EADNSTVILKKDGRYYLGLMARGRNKLFDDRNLPKILEGVENGKYEKV |
| | VYKYFPDQAKMFPKVCFSTKGLEFFQPSEEVITIYKNSEFKKGYTFNVRS |
| | MQRLIDFYKDCLVRYEGWQCYDFRNLRKTEDYRKNIEEFFSDVAMDGY |
| | KISFQDVSESYIKEKNQNGDLYLFEIKNKDWNEGANGKKNLHTIYFESLF |
| | SADNIAMNFPVKLNGQAEIFYRPRTEGLEKERIITKKGNVLEKGDKAFHK |
| | RRYTENKVFFHVPITLNRTKKNPFQFNAKINDFLAKNSDINVIGVDRGEK |
| | QLAYFSVISQRGKILDRGSLNVINGVNYAEKLEEKARGREQARKDWQQI |
| | EGIKDLKKGYISQVVRKLADLAIQYNAIIVFEDLNMRFKQIRGGIEKSVY |
| | QQLEKALIDKLTFLVEKEEKDVEKAGHLLKAYQLAAPFETFQKMGKQT |
| | GIVFYTQAAYTSRIDPVTGWRPHLYLKYSSAEKAKADLLKFKKIKFVDG |
| | RFEFTYDIKSFREQKEHPKATVWTVCSCVERFRWNRYLNSNKGGYDHY |
| | SDVTKFLVELFQEYGIDFERGDIVGQIEVLETKGNEKFFKNFVFFFNLICQI |
| | RNTNASELAKKDGKDDFILSPVEPFFDSRNSEKFGEDLPKNGDDNGAFNI |
| | ARKGLVIMDKITKFADENGGCEKMKWGDLYVSNVEWDNFVANK |
| SEQ ID NO: | MFNNFIKKYSLQKTLRFELKPVGETADYIEDFKSEYLKDTVLKDEQRAK |
| 97 | DYQEIKTLIDDYHREYIEECLREPVDKKTGEILDFTQDLEDAFSYYQKLK |
| | ENPTENRVGWEKEQESLRKKLVTSFVGNDGLFKKEFITRDLPEWLQKKG |
| | LWGEYKDTVENFKKFTTYFSGFHENRKNMYTAEAQSTAIANRLMNDNL |
| | PKFFNNYLAYQTIKEKHPDLVFRLDDALLQAAGVEHLDEAFQPRYFSRL |
| | FAQSGITAFNELIGGRTTENGEKIQGLNEQINLYRQQNPEKAKGFPRFMP |
| | LFKQILSDRETHSFLPDAFENDKELLQALRDYVDAATSEEGMISQLNKA |
| | MNQFVTADLKRVYIKSAALTSLSQELFHFFGVISDAIAWYAEKRLSPKKA |
| | QESFLKQEVYAIEELNQAVVGYIDQLEDQSELQQLLVDLPDPQKPVSSFI |
| | LTHWQKSQEPLQAVIAKVEPLFELEELSKNKRAPKHDKDQGGEGFQQV |
| | DAIKNMLDAFMEVSHAIKPLYLVKGRKAIDMPDVDTGFYADFAEAYSA |
| | YEQVTVSLYNKTRNHLSKKPFSKDKIKINFDAPTLLNGWDLNKESDNKSI |
| | ILRKDGNFYLAIMHPKHTKVFDCYSASEAAGKCYEKMNYKLLSGANKM |
| | LPKVFFSKKGIETFSPPQEILDLYKNNEHKKGATFKLESCHKLIDFFKRNIP |
| | KYKVHPTDNFGWDVFGFHFSPTSSYGDLSGFYREVEAQGYKLWFSDVS |
| | EAYINKCVEEGKLFLFQIYNKDFSPNSTGKPNLHTLYWKGLFEPENLKDV |
| | VLKLNGEAEIFYRKHSIKHEDKTIHRAKDPIANKNADNPKKQSVFDYDII |
| | KDKRYTQDKFFFHVPISLNFKSQGVVRFNDKINGLLAAQDDVHVIGIDR |
| | GERHLLYYTVVNGKGEVVEQGSLNQVATDQGYVVDYQQKLHAKEKER |
| | DQARKNWSTIENIKELKAGYLSQVVHKLAQLIVKHNAIVCLEDLNFGFK |
| | RGRFKVEKQVYQKFEKALIDKLNYLVFKERGATQAGGYLNAYQLAAPF |
| | ESFEKLGKQTGILYYVRSDYTSKIDPATGFVDFLKPKYESMAKSKVFFES |
| | FERIQWNQAKGYFEFEFDYKKMCPSRKFGDYRTRWVVCTFGDTRYQNR |
| | RNKSSGQWETETIDVTAQLKALFAAYGITYNQEDNIKDAIAAVKYTKFY |
| | KQLYWLLRLTLSLRHSVTGTDEDFILSPVADENGVFFDSRKATDKQPKD |
| | ADANGAYHIALKGLWNLQQIRQHDWNVEKPKKLNLAMKNEEWFGFAQ |
| | KKKFRA |
| SEQ ID NO: | MIKNPSNRYALPKVIISKIDNQNILEFKIKYKKLSKLDIVKVKSMHYDDR |
| 98 | AIIFDEVIVNDGLIDVEYRDNHKTIFVKVGNKSYSISGQKVGGKERLLEN |
| | RVSKTKVQLELKDKATNRVSKTERELIVDDNIKIYSQIVGRDVKTTKDIY |
| | LIKRFLAYRSDLLFYYGFVNNFFHVANNRSEFWKIDFNDSNNSKLIEYFK |
| | FTINDHLKNDENYLKDYISDNEKLKNDLIKVKNSFEKIRHALMHFDYDFF |
| | VKLFNGEDVGLELDIEFLDIMIDKLDKLNIDTKKEFIDDEKITIFGEELSLA |
| | KLYRFYAHTAINRVAFNKLINSFIIENGVENQSLKEYFNQQAGGIAYEIDI |
| | HQNREYKNLYNEHKKLVSRVLSISDGQEIAILNQKIAKLKDQMKQITKA |
| | NSIKRLEYKLRLALGFIYTEYENYEEFKNNFDTDIKNGRFTPKDNDGNKR |
| | AFDSRELEQLKGYYEATIQTQKPKTDEKIEEVSKKIDRLSLKSLIADDILL |
| | KFILLMFTFMPQELKGEFLGFIKKYYHDTKHIDQDTISDSDDTIETLSIGLK |
| | LKILDKNIRSLSILKHSLSFQTKYNKKDRNYYEDGNIHGKFFKKLGISHNQ |
| | EEFNKSVYAPLFRYYSALYKLINDFEIYTLSLHIVGSETLTDQVNKSQFLS |
| | GRYFNFRKLLTQSYHINNNSTHSTIFNAVINMRNDISHLSYEPLFDCPLNG |
| | KKSYKRKIRNQFKTINIKPLVESRKIIIDFITLQTDMQKVLGYDAVNDFTM |
| | KIVQLRTRLKAYANKEQTIQKMITEAKTPNDFYNIYKVQGVEEINKYLLE |
| | VIGETQAEKEIREKIERGNIANF |
| SEQ ID NO: | MIKNPSNRHSLPKVIISEVDHEKILEFKIKYEKLARLDRFEVKAMHYEGK |
| 99 | EIVFDEVLVNGGLIEVEYQDDNKTLFVKVGEKSYSIRGKKVGGKQRLLE |
| | DRVSKTKVQLELSDGVVDNKGNLRKSRTERELIVADNIKLYSQIVGREV |
| | TTTKEIYLVKRFLAYRSDLLFYYSFVDNFFKVAGNEKELWKINEDDATS |
| | AQFMGYIPFMVNDNLKNDNAYLKDYVRNDVQIKDDLKKVQTIFSALRH |
| | TLLHFNYEFFEKLFNGEDVGFDFDIGFLNLLIENIDKLNIDAKKEFIDNEKI |
| | RLFGENLSLAKVYRLYSDICVNRVGFNKFINSMLIKDGVENQVLKAEFN |
| | RKFGGNAYTIDIHSNQEYKRIYNEHKKLVIKVSTLKDGQAIRRGNKKISE |
| | LKEQMKSMTKKNSLARLECKMRLAFGFLYGEYNNYKAFKNNFDTNIKN |
| | SQFDVNDVEKSKAYFLSTYERRKPRTREKLEKVAKDIESLELKTVIANDT |
| | LLKFILLMFVFMPQELKGDFLGFVKKYYHDVHSIDDDTKEQEEDVVEA |
| | MSTSLKLKILGRNIRSLTLFKYALSSQVNYNSTDNIFYVEGNRYGKIYKK |
| | LGISHNQEEFDKTLVVPLLRYYSSLFKLMNDFEIYSLAKANPTAVSLQEL |
| | VDDETSPYKQGNYFNFNKMLRDIYGLTSDEIKSGQVVFMRNKIAHFDTE |
| | VLLSKPLLGQTKMNLQRKDIVSFIEARGDIKELLGYDAINDFRMKVIHLR |
| | TKMRVYSDKLQTMMDLLRNAKTPNDFYNVYKVKGVESINKHLLEVLA |
| | QTAEERTVEKQIRDGNEKYDL |
| SEQ ID NO: | MEEKMLKSYDYFTKLYSLQKTLRFELKPIGKTLEHIKNSGIIESDETLEEQ |
| 100 | YAIVKNIIDKLHRKHIDEALSLVDFTKHLDTLKTFQELYLKRGKTDKEKE |
| | ELEKLSADLRKLIVSYLKGNVKEKTQHNLNPIKERFEILFGKELFTNEEFF |
| | LLAENEKEKKAIQAFKGFTTYFKGFQENRKNMYSEEGNSTSIAYRIINEN |
| | LPLFIENIARFQKVMSTIEKTTIKKLEQNLKTELKKHNLPGIFTIEYFNNVL |
| | TQEGISRYNTIIGGKTTHEGVKIQGLNEIINLYNQQSKDVKLPILKPLHKQI |
| | LSEEYSTSFKIKAFENDNEVLKAIDTFWNEHIEKSIHPVTGNKFNILSKIEN |
| | LCDQLQKYKDKDLEKLFIERKNLSTVSHQVYGQWNIIRDALRMHLEMN |
| | NKNIKEKDIDKYLDNDAFSWKEIKDSIKIYKEHVEDAKELNENGIIKYFS |
| | AMSINEEDDEKEYSISLIKNINEKYNNVKSILQEDRTGKSDLHQDKEKVGI |
| | IKEFLDSLKQLQWFLRLLYVTVPLDEKDYEFYNELEVYYEALLPLNSLY |
| | NKVRNYMTRKPYSVEKFKLNFNSPTLLDGWDKNKETANLSIILRKNGKY |
| | YLGIMNKENNTIFEYYPGTKSNDYYEKMIYKLLPGPNKMLPKVFFSKKG |
| | LEYYNPPKEILNIYEKGEFKKDKSGNFKKESLHTLIDFYKEAIAKNEDWE |
| | VFNFKFKNTKEYEDISQFYRDVEEQGYLITFEKVDANYVDKLVKEGKLY |
| | LFQIYNKDFSENKKSKGNPNLHTIYWKGLYDSENLKNVVYKLNGEAEVF |
| | YRKKSIDYPEEIYNHGHHKEELLGKFNYPIIKDRRYTQDKFLFHVPITMNF |
| | ISKEEKRVNQLACEYLSATKEDVHIIGIDRGERHLLYLSLIDKEGNIKKQL |
| | SLNTIKNENYDKEIDYRVKLDEKEKKRDEARKNWDVIENIKELKEGYMS |
| | QVIHIIAKMMVEEKAILIMEDLNIGFKRGRFKVEKQVYQKFEKMLIDKLN |
| | YLVFKNKNPLEPGGSLNAYQLTSKFDSFKKLGKQSGFIFYVPSAYTSKID |
| | PTTGFYNFIQVDVPNLEKGKEFFSKFEKIIYNTKEDYFEFHCKYGKFVSEP |
| | KNKDNDRKTKESLTYYNAIKDTVWVVCSTNHERYKIVRNKAGYYESHP |
| | VDVTKNLKDIFSQANINYNEGKDIKPIIIESNNAKLLKSIAEQLKLILAMR |
| | YNNGKHGDDEKDYILSPVKNKQGKFFCTLDGNQTLPINADANGAYNIAL |
| | KGLLLIEKIKKQQGKIKDLYISNLEWFMFMMSR |
| SEQ ID NO: | MEKSLNDFIGLYSVSKTLRFELKPVSETLENIKKFHFLEEDKKKANDYKD |
| 101 | VKKIIDNYHKYFIDDVLKNASFNWKKLEEAIREYNKNKSDDSALVAEQK |
| | KLGDAILKLFTSDKRYKALTAATPKELFESILPDWFGEQCNQDLNKAAL |
| | KTFQKFTSYFTGFQENRKNVYSAEAIPTAVPYRIVNDNFPKFLQNVLIFKT |
| | IQEKCPQIIDEVEKELSSYLGKEKLAGIFTLESFNKYLGQGGKENQRGIDF |
| | YNQIIGGVVEKEGGINLRGVNQFLNLYWQQHPDFTKEDRRIKMVPLYKQ |
| | ILSDRSSLSFKIESIENDEELKNALLECADKLELKNDEKKSIFEEVCDLFSS |
| | VKNLDLSGIYINRKDINSVSRILTGDWSWLQSRMNVYAEEKFTTKAEKA |
| | RWQKSLDDEGENKSKGFYSLTDLNEVLEYSSENVAETDIRITDYFEHRCR |
| | YYVDKETEMFVQGSELVALSLQEMCDDILKKRKAMNTVLENLSSENKL |
| | REKTDDVAVIKEYLDAVQELLHRIKPLKVNGVGDSTFYSVYDSIYSALSE |
| | VISVYNKTRNYITKKAASPEKYKLNFDNPTLADGWDLNKEQANTSVILR |
| | KDGMFYLGIMNPKNKPKFAEKYDCGNESCYEKMIYKQFDATKQIPKCST |
| | QKKEVQKYFLSGATEPYILNDKKSFKSELIITKDIWFMNNHVWDGEKFV |
| | PKRDNETRPKKFQIGYFKQTGDFDGYKNALSNWISFCKNFLQSYLSATV |
| | YDYNFKNSEEYEGLDEFYNYLNATCYKLNFINIPETEINKMVSEGKLYLF |
| | QIYNKDFASGSTGMPNMHTLYWKNLFSDENLKNVCLKLNGEAELFYRP |
| | AGIKEPVIHKEGSYLVNRTTEDGESIPEKIYFEIYKNANGKLEKLSDEAQN |
| | YISNHEVVIKKAGHEIIKDRHYTEPKFLFHVPLTINFKASGNSYSINENVR |
| | KFLKNNPDVNIIGLDRGERHLIYLSLINQKGEIIKQFTFNEVERNKNGRTIK |
| | VNYHEKLDQREKERDAARKSWQAIGKIAELKEGYLSAVIHQLTKLMVE |
| | YNAVVVMEDLNFGFKRGRFHVEKQVYQKFEHILIDKSNYLVFKDRGLN |
| | EPGGVLNGYQIAGQFESFQKLGKQSGMLFYVPAGYTSKIDPKTGFVSMM |
| | NFKDLTNVHKKRDFFSKFDNIHYDEANGSFVFTFDYKKFDGKAKEEMK |
| | LTKWSVYSRDKRIVYFAKTKSYEDVLPTEKLQKIFESNGIDYKSGNNIQD |
| | SVMAIGADLKEGAKPSKEISDFWDGLLSNFKLILQMRNSNARTGEDYIIS |
| | PVMADDGTFFDSREEFKKGEDAKLPLDADANGAYHIALKGLSLINKINL |
| | SKDEELKKFDMKISNADWFKFAQEKNYAK |
| SEQ ID NO: | MNTQKKEFNPKSFKDFTNLYSLNKTLRFSLTPNKKTAEILEFNKQKEVKC |
| 102 | FSNDRKIAGAYQEIKKYLNKLHQEFIQEAMKFFAFSEEELKGFEKEYLNL |
| | LNFTDKDNFKKKNKIRNEYEQERKILTIKIATYFSKFKSEKYQSFNLANIT |
| | GKKVFSILEQKYKEDKKTLKIIHIFKYKPTKDEKKEGEAVNFSTYLTGFN |
| | ENRKNFYKSEDKAGQFATRTIDNLAQFIKNKKLFEDKYQKNYSKIGILDE |
| | QIKIFNLDYFNNLFLQEGLDEYNGILGNNKGEENKSNEGINQKINIFKQKE |
| | KARLKKEKENFNKSDFPLFKELYKQIGSIRKENDVYVEIKTDKELVEELN |
| | NFPKNVENYLKDIQSFYKTFFEKLQNEEYELDKIYLPKSVGTYFSYIAFSD |
| | WNKLAFIYNKRYKNEKIKIVEGGDVNVQYRSLEVLKNRIDELKDEDNLN |
| | FNKFFIDKLKFNEAKKENNWQNFWFCIEYYINSQFIGGEKNILNKEKNEY |
| | EILPFGSLKELKEKYFEAVKKYKEKMVDTESGLTDDEEKEIKETLKNYLD |
| | RIKEIERIAKYFDLKKSFEEIKQEDLDSNFYGEYQKVVDKTNELKIYQYYS |
| | EFRNYLTQNNSVEEKIKLNFNSGLLLDGWDLNKEKVKFSIIFQENGKYYL |
| | GIINKEKDKTILDKDKHPEIFTKNSDFRKMEYKLFPSPSKMLPKISFSETA |
| | KKGDEDVGWSEEIQKIKDEFAEFQEYKKKSKDNWKDEFNRGKLNKLID |
| | YYKQVLEKHSEGYMNTYNFELKDSSKYKNLGEFNDDIARQNYKVKFVG |
| | IDKNYIDEKVANGELFLFQIYNKDFSEDKKEGSTNNLETIYFKELFSKENL |
| | ENPVFKLSGGAEMFFRNKIEKKKEKKKLDKDGKPMISKKGEKVVDKRR |
| | FSENKILFHLPIEINYGKGKMPNFNKKINEYISKNPENIKIIGIDRGEKHLLY |
| | YSIIDQNGNNIESMSLNAVDEFGNFVNPEKLEEYEIDNNGKKERRWKYIV |
| | NDKEIKVTNYQRKLDELEKERQKSRQSWQNINKIKNLKKGYISFVVKKI |
| | VDLAIENNAIIILEDLNFGFKSFRQKIEKNVYQQFEKALIDKLGFVVDKQK |
| | QNQRFAPQLSAPFESFQKIGKQTGIVYYVLANNTSKVCPSCQWIKNFYLK |
| | YEKKNTIFNLQKNQKLKVFFEQEKNRFRFEYQMSKEYISVYSDVDRQRY |
| | DKTKNQNKGGYLEYKNSNQKEIIDKDGVIQKQSITLQLKELFKENHIDLE |
| | KEILKQLDNKKEKNSGYTGVYNKFIYLFNLILQIRNAISFREKDYIQCPSC |
| | HFDTRKENYLKINDGDGNGAYNIALRGLYLLKGKNGIINNLEKIKLIFSN |
| | NDYFQWAKKLKNKK |
| SEQ ID NO: | MQNKQSFADFTNLYSLSKTLRFELKPIGQTQAMLDENKIFEVDENRKKA |
| 103 | YDKTKPYFDRLHREFINESLSNAQLKGISEYFETFKQFRSNQNNKDLKELI |
| | NKQQKFLRHQIVTLFDENGKHWATTKYAHLKIKKKNLDILFDEQVFYIL |
| | KERYGSEKETQLVDKETGAVTSIFDNWKGFTGYFTKFFETRKNFYKSDG |
| | TSTALATRIIDQNLNRFFDNLETFHKIKDKIDVKEVEIFFKLKADNVFSIDF |
| | YNQCLLQNGIDKYNDFLGGQTLENGEKQKGINEIINKYRQDNKDQKLPF |
| | LKKLDKQILSEKDRFINEIESKEEFFQVLTEFYQSATVKVTIIKTLLNDFVH |
| | NTDKYKLEKIYLTKEAFNTIANKWTDETQIFEDNLDLVLKNKKITAKQD |
| | FIPLAYIKEALEVIEKDRKFFKDRYYNDPQIGFFPDQSYWEQFLAILNFEF |
| | MTHFQRVAKDKITGKKIELGYFVFEKRIKELLDSDPSLNSQSKIIIKEFADE |
| | VLHIFQMAKYFALEKKREWKGDYYQLDDQFYNHIDYGFKDQFYENAY |
| | EKIVQPYNKIRNYLTKKPYSDVKWKLNFGNPTLANGWDKNKEADNTAV |
| | ILKKDGNYYLGVMKKGKNKIFSDQNKEKYKAYNSAYYEKLVYKLFPDP |
| | SKMFPKVCFSKKGLNFFQPSEEILRIYKNNEFKKGNTFSISSMQKLIAFYID |
| | CLGLYEGWKHYEFKNIKDVRQYKENIGEFYADVAESGYKLWFEKISEEY |
| | ITQKNQLGELFLFQIYNKDFAKKTTGRKNLHTIYFEELFSQTNIDNNFPFK |
| | LNGQAELFYRPKSLEKIEEKRNFKRSIVNKKRYTQNKIFFHVPITLNRTSE |
| | NIGRFNVRVNNFLANNSNVNIVGVDRGEKNLAYYSIIKQNGEVLKSGSL |
| | NIINGVDYHALLTDRAQRREQERRNWQDVESIKDLKRGYISQVVHELVS |
| | LAIKYNAIIVMEDLNMRFKQIRGGIEKSTYQQLEKALIEKLNFLVNKEET |
| | DSNQAGNLLNAYQLTAPFKTFKDMGKQTGIIFYTQASYTSKIDPLTGWR |
| | PNIYLRYSNAKQAKADILMFTNIYFSEKKDRFEFTYDLEKIDDKRKDLPIK |
| | TEWTVCSNVERFSWEKSLNNNKGGYVHYPIQDSNGEESITSKLKKLFMD |
| | FGIDLTDIKTQIESLDTNKKDNANFFRKFIFYFQLICQIRNTQVNKSDDGN |
| | DFIFSPVEPFFDSRFADKFRKNLPKNGDENGAYNIARKGLIILHKISDYFV |
| | KEGSTDKISWKDLSISQTEWDNFTTDK |
| SEQ ID NO: | MKKEKEFKSFGDFTNLYEISKTLRFELKPVENTQTMLDEADVFGKDKVI |
| 104 | KDKYTKTKPFIDKLHREFVDESLKDVSLSGLKKYSEVLENWKKNKKDK |
| | DIVKELKKEEERLRKEVVEFFDNTAKKWANEKYKELGLKKKDIGILFEE |
| | SVFDLLKEKYGEEQDSFLKEEKGDFLKNEKGEKVSIFDEWKGFVGYFTK |
| | FQETRKNFYKNDGTETALATRIIDQNLKRFCDNIDDFKKIKNKIDFSEVEK |
| | NFNKTADVFSLDFYNQCLLQKGIDSYNEFIGGKTLENGKKLKGVNELVN |
| | EYRQKNKNEKVSFLKLLDKQILSEKEKLSFGIENDEQLLVVLNSFYETAE |
| | EKTKILRTLFGDFVEHNENYDLDKTYISKVAFNTISHKWTNETHKFEELL |
| | YGAMKEDKPIGLNYDKKEDSYKFPDFIALGYLKKCLNNLDCDTKFWKE |
| | KYYENNADKKDKDKGFLTGGQNAWDQFLQIFIFEFNQLFNSEAFDNKG |
| | KEIKIGYDNFRKDFEEIINQKDFKNDENLKIAIKNFADSVLWIYQMAKYF |
| | AIEKKRGWDDDFELSEFYTNPSNGYSLFYDRAYEEIVQKYNDLRNYLTK |
| | KPYKEDKWKLNFENPTLANGFDKNKESDNSTVILRKKRKYYLGLMKKG |
| | NNKIFEDRNKAEFIRNIESGAYEKMAYKYLPDVAKMIPKCSTQLNEAKN |
| | HFRNSADDLEIKKSFSNPLKITKRIFDLNNIQYDKTNVSKKISGDNKGIKIF |
| | QKEYYKISGDFDVYKSALNDWIDFCKDFLSKYDSTKDFDFSILRKTKDY |
| | KSLDEFYVDVAKITYKISFTPVSESYIDQKNKNGELYLFEIYNQDFAKGK |
| | MGAKNLHTLYFENVFSPENISKNFPIKLNGNAELFFRPKSIESKKEKRNFV |
| | REIVNKKRYSEDKIFFHCPITLNRETGSIYRENNYVNNFLSENNINIIGVDR |
| | GEKHLAYYSVIDKNGVKIGGGSFNEINKVDYAKKLEERAGEREQSRKD |
| | WQVVEGIKDLKKGYISQVVRELADLAIKHNAIIVLEDLNMRFKQIRGGIE |
| | KSIYQQLEKALIDKLSFLVEKGEKDPNQAGHILKAYQLAAPFTSFKDMG |
| | KQTGIVFYTQASYTSKTCPNCGFRKNNNKFYFENNIGKAQDALKKLKTF |
| | EYDSENKCFGLSYCLSDFANKEEVEKNKNKKRNNAPYSDIEKKDCFELS |
| | TKDAVRYRWHDKNTERGKTFFEGESVYEEKEEKEIGQTKRGLVKEYDIS |
| | KCLIGLFEKTGLDYKQNLLDKINSGKFDGTFYKNLFNYLNLLFEIRNSISG |
| | TEIDYISCPECQFHTDKSKTIKNGDDNGSYNIARKGMIILDKIKQFKKENG |
| | SLDKMGWGELFIDLEEWDKFAQKKNNNIIDK |
| SEQ ID NO: | MKYTDFTGIYSVSKTLRFELIPQGSTVENMKREGILNNDMHRADSYKEM |
| 105 | KKLIDEYHKAFIERCLSDFSLKYDDTGKHDSLEEYFFYYEQKRNDKTKKI |
| | FEDIQVALRKQISKRFTGDTAFKRLFKKELIKEDLPSFVKNDPVKTELIKE |
| | FSDFTTYFQEFHKNRKNMYTSDAKSTAIAYRIINENLPKFIDNINAFDIVA |
| | KVPEMQEHFKTIADELRSHLQVGNDIDKMFNLQFFNKVLTQSQLDVYN |
| | AVIGGKSEGNKKIQGINEYINLYNQQHKKARLPMLKLLYKQILSDRVAIS |
| | WLQDEFDNDQDMLDTIEAFYNKLNSNETGVLGEGKLKQILMGLDGYNL |
| | DGVFMRNDLQLSEVSQRLCGGWNIIKDAMTSDLKRSVQKKKKETDADF |
| | EERVSKLFSAQNSFSIAYINQCLGQAGIRCKIQDYFACLGAKEGENEAET |
| | TPDIFDQIAEAYHGAAPILNARPSSHNLAQDIEKVKAIKALLDALKRLQRF |
| | VKPLLGRGDEGDKDNFFYGDFMPIWEVLDQLTPLYNKVRNRMTRKPYS |
| | QEKIKLNFENSTLLNGWDLNKEHDNTSVILRREGLYYLGIMNKNYNKIF |
| | DANNVETIGDCYEKMIYKLLPGPNKMLPKVFFSKSRVQEFSPSKKILEIW |
| | ESKSFKKGDNFNLDDCHALIDFYKDSIAKHPDWNKFNFKFSDTQSYTNIS |
| | DFYRDVNQQGYSLSFTKVSVDYVNRMVDEGKLYLFQIYNKDFSPQSKG |
| | TPNMHTLYWRMLFDERNLHNVIYKLNGEAEVFYRKASLRCDRPTHPAH |
| | QPITCKNENDSKRVCVFDYDIIKNRRYTVDKFMFHVPITINYKCTGSDNI |
| | NQQVCDYLRSAGDDTHIIGIDRGERNLLYLVIIDQHGTIKEQFSLNEIVNE |
| | YKGNTYCTNYHSLLEEKEAGNKKARQDWQTIESIKELKEGYLSQVIHKIS |
| | MLMQRYHAIVVLEDLNGSFMRSRQKVEKQVYQKFEHMLINKLNYLVN |
| | KQYDATEPGGLLHALQLTSRMDSFKKLGKQSGFLFYIPAWNTSKIDPVT |
| | GFVNLFDTRYCNEAKAKEFFEKFDDISYNDERDWFEFSFDYRHFTNKPT |
| | GTRTQWTLCTQGTRVRTFRNPEKSNHWDNEEFDLTQAFKDLFNKYGIDI |
| | ASGLKARIVNGQLTKETSAVKDFYESLLKLLKLTLQMRNSVTGTDIDYL |
| | VSPVADKDGIFFDSRTCGSLLPANADANGAFNIARKGLMLLRQIQQSSID |
| | AEKIQLAPIKNEDWLEFAQEKPYL |
| SEQ ID NO: | MEKEITELTKIRREFPNKKFSSTDMKKAGKLLKAEGPDAVRDFLNSCQEI |
| 106 | IGDFKPPVKTNIVSISRPFEEWPVSMVGRAIQEYYFSLTKEELESVHPGTSS |
| | EDHKSFFNITGLSNYNYTSVQGLNLIFKNAKAIYDGTLVKANNKNKKLE |
| | KKFNEINHKRSLEGLPIITPDFEEPFDENGHLNNPPGINRNIYGYQGCAAK |
| | VFVPSKHKMVSLPKEYEGYNRDPNLSLAGFRNRLEIPEGEPGHVPWFQR |
| | MDIPEGQIGHVNKIQRFNFVHGKNSGKVKFSDKTGRVKRYHHSKYKDA |
| | TKPYKFLEESKKVSALDSILAIITIGDDWVVFDIRGLYRNVFYRELAQKGL |
| | TAVQLLDLFTGDPVIDPKKGVVTFSYKEGVVPVFSQKIVPRFKSRDTLEK |
| | LTSQGPVALLSVDLGQNEPVAARVCSLKNINDKITLDNSCRISFLDDYKK |
| | QIKDYRDSLDELEIKIRLEAINSLETNQQVEIRDLDVFSADRAKANTVDM |
| | FDIDPNLISWDSMSDARVSTQISDLYLKNGGDESRVYFEINNKRIKRSDY |
| | NISQLVRPKLSDSTRKNLNDSIWKLKRTSEEYLKLSKRKLELSRAVVNYT |
| | IRQSKLLSGINDIVIILEDLDVKKKFNGRGIRDIGWDNFFSSRKENRWFIPA |
| | FHKAFSELSSNRGLCVIEVNPAWTSATCPDCGFCSKENRDGINFTCRKCG |
| | VSYHADIDVATLNIARVAVLGKPMSGPADRERLGDTKKPRVARSRKTM |
| | KRKDISNSTVEAMVTA |
| SEQ ID NO: | MIKPTVSQFLTPGFKLIRNHSRTAGLKLKNEGEEACKKFVRENEIPKDEC |
| 107 | PNFQGGPAIANIIAKSREFTEWEIYQSSLAIQEVIFTLPKDKLPEPILKEEW |
| | RAQWLSEHGLDTVPYKEAAGLNLIIKNAVNTYKGVQVKVDNKNKNNL |
| | AKINRKNEIAKLNGEQEISFEEIKAFDDKGYLLQKPSPNKSIYCYQSVSPK |
| | PFITSKYHNVNLPEEYIGYYRKSNEPIVSPYQFDRLRIPIGEPGYVPKWQY |
| | TFLSKKENKRRKLSKRIKNVSPILGIICIKKDWCVFDMRGLLRTNHWKKY |
| | HKPTDSINDLFDYFTGDPVIDTKANVVRFRYKMENGIVNYKPVREKKGK |
| | ELLENICDQNGSCKLATVDVGQNNPVAIGLFELKKVNGELTKTLISRHPT |
| | PIDFCNKITAYRERYDKLESSIKLDAIKQLTSEQKIEVDNYNNNFTPQNTK |
| | QIVCSKLNINPNDLPWDKMISGTHFISEKAQVSNKSEIYFTSTDKGKTKD |
| | VMKSDYKWFQDYKPKLSKEVRDALSDIEWRLRRESLEFNKLSKSREQD |
| | ARQLANWISSMCDVIGIENLVKKNNFFGGSGKREPGWDNFYKPKKENR |
| | WWINAIHKALTELSQNKGKRVILLPAMRTSITCPKCKYCDSKNRNGEKF |
| | NCLKCGIELNADIDVATENLATVAITAQSMPKPTCERSGDAKKPVRARK |
| | AKAPEFHDKLAPSYTVVLREAV |
| SEQ ID NO: | MEKEITELTKIRREFPNKKFSSTDMKKAGKLLKAEGPDAVRDFLNSCQEI |
| 108 | IGDFKPPVKTNIVSISRPFEEWPVSMVGRAIQEYYFSLTKEELESVHPGTSS |
| | EDHKSFFNITGLSNYNYTSVQGLNLIFKNAKAIYDGTLVKANNKNKKLE |
| | KKFNEINHKRSLEGLPIITPDFEEPFDENGHLNNPPGINRNIYGYQGCAAK |
| | VFVPSKHKMVSLPKEYEGYNRDPNLSLAGFRNRLEIPEGEPGHVPWFQR |
| | MDIPEGQIGHVNKIQRFNFVHGKNSGKVKFSDKTGRVKRYHHSKYKDA |
| | TKPYKFLEESKKVSALDSILAHITIGDDWVVFDIRGLYRNVFYRELAQKGL |
| | TAVQLLDLFTGDPVIDPKKGVVTFSYKEGVVPVFSQKIVPRFKSRDTLEK |
| | LTSQGPVALLSVDLGQNEPVAARVCSLKNINDKITLDNSCRISFLDDYKK |
| | QIKDYRDSLDELEIKIRLEAINSLETNQQVEIRDLDVFSADRAKANTVDM |
| | FDIDPNLISWDSMSDARVSTQISDLYLKNGGDESRVYFEINNKRIKRSDY |
| | NISQLVRPKLSDSTRKNLNDSIWKLKRTSEEYLKLSKRKLELSRAVVNYT |
| | IRQSKLLSGINDIVIILEDLDVKKKFNGRGIRDIGWDNFFSSRKENRWFIPA |
| | FHKTFSELSSNRGLCVIEVNPAWTSATCPDCGFCSKENRDGINFTCRKCG |
| | VSYHADIDVATLNIARVAVLGKPMSGPADRERLGDTKKPRVARSRKTM |
| | KRKDISNSTVEAMVTA |
| SEQ ID NO: | VPDKKETPLVALCKKSFPGLRFKKHDSRQAGRILKSKGEGAAVAFLEGK |
| 109 | GGTTQPNFKPPVKCNIVAMSRPLEEWPIYKASVVIQKYVYAQSYEEFKA |
| | TDPGKSEAGLRAWLKATRVDTDGYFNVQGLNLIFQNARATYEGVLKKV |
| | ENRNSKKVAKIEQRNEHRAERGLPLLTLDEPETALDETGHLRHRPGINCS |
| | VFGYQHMKLKPYVPGSIPGVTGYSRDPSTPIAACGVDRLEIPEGQPGYVP |
| | PWDRENLSVKKHRRKRASWARSRGGAIDDNMLLAVVRVADDWALLDL |
| | RGLLRNTQYRKLLDRSVPVTIESLLNLVINDPTLSVVKKPGKPVRYTATL |
| | IYKQGVVPVVKAKVVKGSYVSKMLDDTTETFSLVGVDLGVNNLIAANA |
| | LRIRPGKCVERLQAFTLPEQTVEDFFRFRKAYDKHQENLRLAAVRSLTAE |
| | QQAEVLALDTFGPEQAKMQVCGHLGLSVDEVPWDKVNSRSSILSDLAK |
| | ERGVDDTLYMFPFFKGKGKKRKTEIRKRWDVNWAQHFRPQLTSETRKA |
| | LNEAKWEAERNSSKYHQLSIRKKELSRHCVNYVIRTAEKRAQCGKVIVA |
| | VEDLHHSFRRGGKGSRKSGWGGFFAAKQEGRWLMDALFGAFCDLAVH |
| | RGYRVIKVDPYNTSRTCPECGHCDKANRDRVNREAFICVCCGYRGNADI |
| | DVAAYNIAMVAITGVSLRKAARASVASTPLESLAAE |
| SEQ ID NO: | MPKPAVESEFSKVLKKHFPGERFRSSYMKRGGKILAAQGEEAVVAYLQ |
| 110 | GKSEEEPPNFQPPAKCHVVTKSRDFAEWPIMKASEAIQRYIYALSTTERA |
| | ACKPGKSSESHAAWFAATGVSNHGYSHVQGLNLIFDHTLGRYDGVLKK |
| | VQLRNEKARARLESINASRADEGLPEIKAEEEEVATNETGHLLQPPGINPS |
| | FYVYQTISPQAYRPRDEIVLPPEYAGYVRDPNAPIPLGVVRNRCDIQKGC |
| | PGYIPEWQREAGTAISPKTGKAVTVPGLSPKKNKRMRRYWRSEKEKAQ |
| | DALLVTVRIGTDWVVIDVRGLLRNARWRTIAPKDISLNALLDLFTGDPVI |
| | DVRRNIVTFTYTLDACGTYARKWTLKGKQTKATLDKLTATQTVALVAI |
| | DLGQTNPISAGISRVTQENGALQ |
| | CEPLDRFTLPDDLLKDISAYRIAWDRNEEELRARSVEALPEAQQAEVRAL |
| | DGVSKETARTQLCADFGLDPKRLPWDKMSSNTTFISEALLSNSVSRDQV |
| | FFTPAPKKGAKKKAPVEVMRKDRTWARAYKPRLSVEAQKLKNEALWA |
| | LKRTSPEYLKLSRRKEELCRRSINYVIEKTRRRTQCQIVIPVIEDLNVRFFH |
| | GSGKRLPGWDNFFTAKKENRWFIQGLHKAFSDLRTHRSFYVFEVRPERT |
| | SITCPKCGHCEVGNRDGEAFQCLSCGKTCNADLDVATHNLTQVALTGK |
| | TMPKREEPRDAQGTAPARKTKKASKSKAPPAEREDQTPAQEPSQTS |
| SEQ ID NO: | MSNKTTPPSPLSLLLRAHFPGLKFESQDYKIAGKKLRDGGPEAVISYLTG |
| 111 | KGQAKLKDVKPPAKAFVIAQSRPFIEWDLVRVSRQIQEKIFGIPATKGRP |
| | KQDGLSETAFNEAVASLEVDGKSKLNEETRAAFYEVLGLDAPSLHAQA |
| | QNALIKSAISIREGVLKKVENRNEKNLSKTKRRKEAGEEATFVEEKAHDE |
| | RGYLIHPPGVNQTIPGYQAVVIKSCPSDFIGLPSGCLAKESAEALTDYLPH |
| | DRMTIPKGQPGYVPEWQHPLLNRRKNRRRRDWYSASLNKPKATCSKRS |
| | GTPNRKNSRTDQIQSGRFKGAIPVLMRFQDEWVIIDIRGLLRNARYRKLL |
| | KEKSTIPDLLSLFTGDPSIDMRQGVCTFIYKAGQACSAKMVKTKNAPEIL |
| | SELTKSGPVVLVSIDLGQTNPIAAKVSRVTQLSDGQLSHETLLRELLSNDS |
| | SDGKEIARYRVASDRLRDKLANLAVERLSPEHKSEILRAKNDTPALCKA |
| | RVCAALGLNPEMIAWDKMTPYTEFLATAYLEKGGDRKVATLKPKNRPE |
| | MLRRDIKFKGTEGVRIEVSPEAAEAYREAQWDLQRTSPEYLRLSTWKQE |
| | LTKRILNQLRHKAAKSSQCEVVVMAFEDLNIKMMHGNGKWADGGWD |
| | AFFIKKRENRWFMQAFHKSLTELGAHKGVPTIEVTPHRTSITCTKCGHCD |
| | KANRDGERFACQKCGFVAHADLEIATDNIERVALTGKPMPKPESERSGD |
| | AKKSVGARKAAFKPEEDAEAAE |
| SEQ ID NO: | MSKTKELNDYQEALARRLPGVRHQKSVRRAARLVYDRQGEDAMVAFL |
| 112 | DGKEVDEPYTLQPPAKCHILAVSRPIEEWPIARVTMAVQEHVYALPVHE |
| | VEKSRPETTEGSRSAWFKNSGVSNHGVTHAQTLNAILKNAYNVYNGVIK |
| | KVENRNAKKRDSLAAKNKSRERKGLPHFKADPPELATDEQGYLLQPPSP |
| | NSSVYLVQQHLRTPQIDLPSGYTGPVVDPRSPIPSLIPIDRLAIPPGQPGYV |
| | PLHDREKLTSNKHRRMKLPKSLRAQGALPVCFRVFDDWAVVDGRGLLR |
| | HAQYRRLAPKNVSIAELLELYTGDPVIDIKRNLMTFRFAEAVVEVTARKI |
| | VEKYHNKYLLKLTEPKGKPVREIGLVSIDLNVQRLIALAIYRVHQTGESQ |
| | LALSPCLHREILPAKGLGDFDKYKSKFNQLTEEILTAAVQTLTSAQQEEY |
| | QRYVEESSHEAKADLCLKYSITPHELAWDKMTSSTQYISRWLRDHGWN |
| | ASDFTQITKGRKKVERLWSDSRWAQELKPKLSNETRRKLEDAKHDLQR |
| | ANPEWQRLAKRKQEYSRHLANTVLSMAREYTACETVVIAIENLPMKGG |
| | FVDGNGSRESGWDNFFTHKKENRWMIKDIHKALSDLAPNRGVHVLEVN |
| | PQYTSQTCPECGHRDKANRDPIQRERFCCTHCGAQRHADLEVATHNIAM |
| | VATTGKSLTGKSLAPQRLQEAAE |
| SEQ ID NO: | VAFLDGKEVDEPYTLQPPAKCHILAVSRPIEEWPIARVTMAVQEHVYAL |
| 113 | PVHEVEKSRPETTEGSRSAWFKNSGVSNHGVTHAQTLNAILKNAYNVY |
| | NGVIKKVENRNAKKRDSLAAKNKSRERKGLPHFKADPPELATDEQGYL |
| | LQPPSPNSSVYLVQQHLRTPQIDLPSGYTGPVVDPRSPIPSLIPIDRLAIPPG |
| | QPGYVPLHDREKLTSNKHRRMKLPKSLRAQGALPVCFRVFDDWAVVD |
| | GRGLLRHAQYRRLAPKNVSIAELLELYTGDPVIDIKRNLMTFRFAEAVVE |
| | VTARKIVEKYHNKYLLKLTEPKGKPVREIGLVSIDLNVQRLIALAIYRVH |
| | QTGESQLALSPCLHREILPAKGLGDFDKYKSKFNQLTEEILTAAVQTLTS |
| | AQQEEYQRYVEESSHEAKADLCLKYSITPHELAWDKMTSSTQYISRWLR |
| | DHGWNASDFTQITKGRKKVERLWSDSRWAQELKPKLSNETRRKLEDAK |
| | HDLQRANPEWQRLAKRKQEYSRHLANTVLSMAREYTACETVVIAIENLP |
| | MKGGFVDGNGSRESGWDNFFTHKKENRWMIKDIHKALSDLAPNRGVH |
| | VLEVNPQYTSQTCPECGHRDKANRDPIQRERFCCTHCGAQRHADLEVAT |
| | HNIAMVATTGKSLTGKSLAPQRLQ |
| SEQ ID NO: | MIKKPSNRHALPKVIISKVDNQNILEFKIKYKKLSRLDRVEIKTMHYDDR |
| 114 | AIVFDEVIINGGLIDVEYRDNHKTIFVKVGDKSYSISGQKVGGKERLLEN |
| | RISQTKVQLELKDEATNRVSKTERELIVDDNIKLYSQIVGRDVKTTKDIY |
| | LIKRFLGYRSDLLFYYGFVNNFFHVANNRPEFWKIDFNDNRNSKLIEYFIF |
| | TINDHLKNDENYLKDYISDRGQIVDDLENIKHIFSALRHGLMHFDYDFFE |
| | ALFNGEDIDIKMDNQGNTQPLSSLNIKFLDIMIDKLDKLNIDTKKEFIDAE |
| | KITIFGEELSLAKLYRFYAHTAINRVAFNKLINSFIIENGVENQSLKEYFNQ |
| | QAGGIAYEIDIHQNREYKNLYNEHKKLVSRVLSISDGQEIATLNQKIVEL |
| | KEQMKQITKINSIKRLEYKLRLAFGFIYTEYKNYEEFKNSFDTDIKNGRFT |
| | PKDEDGNKRAFDSRELEHLKGYYKATLQTQKPQTDEKMEEVSKRVDRL |
| | SLKSLIGDDTLLKFILLMFTFMPQELKGEFLGFIKKYYHDTKHIDQDTISD |
| | SDDTIEEGLSIGLKLKILDKNIRSLSILKHSLSFQTKYNKKDRSYYEDGNIH |
| | GKFFKKLGISHNQEEFNKSVYAPLFRYYSALYKLINDFEIYTLSLHIVGNE |
| | TLSDQVNKPQFLSGRYFNFRKLLTQSYNISNNSTHSVIFNAVINMRNDISH |
| | LSYEPLLDCPLNGKKSYKRKIRNQFRTINIKPLVESRKMIIDFITLQTDMQ |
| | KVLGCDAVNDFTMKIVQLRTRLKAYANKEQTIEKMITEAKTPNDFYNIY |
| | KVKGVEAINKYLLEVIGETQVEKEIREEIERGNIANS |
| SEQ ID NO: | MLKKPSNRYALPKVILSTVDHEKILEFKVKYEKLARLDRLVVERMHFDG |
| 115 | ESVVFDEVIANSGDLEIAYQDDHRKLLIQAAGKSYTITGKKVGGKKRKL |
| | EERISRAKIQLTLTDGQEDQHRRIRATVTEKALLEPKEDRDIYSKISDRKI |
| | KTSKEIYLVKRFLSYRSDLLFYYFFVDNFFKVGNNKQELWKIKFQNQPEL |
| | IEYFRFIINDRFKNAKNDKFDNYLKNDKAIQEDLEKIQKVFEKLRHALMH |
| | YDYGFFEKLFGGEDQGFDLDIAFLDNFVKKIDKLNIDTKKEFVDDEKIKIF |
| | GEDLNLADLYKLYASISINRVGFNRVVNEMIIKDGIEKSELKRAFEKKLD |
| | KTYALDIHSDPSYKKLYNEHKRLVTEVSTYTDGNKIKEGNQKIAKLKYE |
| | MKEITKKNALVRLECKMRLAFGLIYGRYDTHEAFKNGFDTDLKRGEFA |
| | QIGSEEAIGYFNTTFEKSKPKSKEEIKKIARQIDNLSLSTLIEDDPLMKFIVL |
| | MFLFVPRELKGEFLGFWRKYYHDIHSIDSDAKSDEMPDEVSLSLKLKILT |
| | RNIRRLNLFEYSLSEKIKYSPKNTQFYTDKSPYQKVYKRLKISHNKEEFD |
| | KTLLVPLFRYYSILFKLINDFEIYSLAKANPDASSLSELTKTKHGFRGHYN |
| | FTTLMMDAHKVSQGDSKKHFGIRGEIAHINTKDLIYDPLFRKSKMAQQR |
| | NDVIDFVLKYEKEIKAVLGYDAINDFRMKVVQLRTKLKVYSDKTQTIEK |
| | LLNEVEAPDDFYVLYKVKGVEAINKYLLEIVSVTQAEEEIERKIITGNKR |
| | YNT |
| SEQ ID NO: | MIKSYDDFTKLYSLQKTLRFELKPIGKTLEHIKKSEIIESDETLEEQYAIVK |
| 116 | NIIDRFHRKHIDEALSLVDFTKHLDTFKTIQELYLKRGKTDREKKELEELS |
| | ADLRKLIVSYLKGNVKQKTQHNLNPIKERFEILFGKELFTNEEFFTLAEN |
| | KEEKKAIQAFKGFTTYFKGFQENRKNMYSEEDKSTAIAYRIINENMPLFIE |
| | NIARFQKVLDVIEKTKLTELKQNLKTELKGHSVSDIFRIEYFNNVLTQEGI |
| | SRYNTIIGGKTTTEGVKIQGLNEIINLHNQQSKDVKLPILKPLHKQILSEEY |
| | STSFKIKAFENDNEVLKAIDTFWNEHIEKSIHPVTGKRFNILLKIENLCKKL |
| | EKYKDKEIEKLFIERKNLSTVSHQVYGQWNIIRDALRMHLEMNNKNIKE |
| | KDIDKYLDNDAFAWKEIKDSIKIYKEHVEDAKELDENGIVKYFSSMSINE |
| | EDDEKEYSISLIKNINEKYNNVKSILEEDRTGKSDLHQDKEKVAIIKEFLD |
| | SLKQLQWFLKLLYVTVPLDEKDYEFYNELEVYYEALLPLNSLYNKVRN |
| | YMTRKPYSVEKFKLNFYSPTLLDGWDKNKETANLSIILKKNGKYYLGIM |
| | NKENNTIFENFPKSKSNDYYEKMIYKLLPGPNKMLPKVFFSKKGLEYYK |
| | PSKEILRIYEKGEFKKDKSGNFKKESLHTLIDFYKEAIAKNEDWKIFKFKF |
| | KNTREYEDISQFYRDVEEQGYLIIFEKVDANYVDKLVEEGELYLFQIYNK |
| | DFSENKKSKGNPNLHTIYWESLFDNQNLKDVVYKLNGEAEVFYRKKSID |
| | YPEEIYNNGHHKEELNGKFNYPIIKDRRYTQDKFLFHVPITMNFISKEEKR |
| | VNQLACEYLSTTKEDVHIIGIDRGERHLLYLSLIDKEGNIKKQLSLNTIKN |
| | ENYDKEIDYRVKLDEKEKKRDEARKNWDVIENIKELKEGYMSQVIHIIA |
| | KMMAEEKAILIMEDLNIGFKRGRFKVEKQVYQKFEKMMIDKLNYLVFK |
| | NKEPLEPGGSLNAYQLTSKFDSFKKLGKQSGFIFYVPSAYTSKIDPTTGFY |
| | NFIRVDVPNLEKGKEFFSKFEKIIYNTKEDYFEFHCKYGKFVPEPKNKDN |
| | DRKTKESLTYYNAIKDTVWVVCSTHHERYKIVRNKAGYYESQPVDVTK |
| | NLRDIFSEANINYSDGKDIKPIIIESNNAKLLKSIAEQLKLILAMRYNNGKH |
| | DDDEKDYILSPVKNKQGKFFCSLDGDQSLPINADANGAYNIALKGLLLIE |
| | KIKKQQGKAKDLYISNLEWFMFMMSR |
| SEQ ID NO: | MIKSYDDFTKLYSLQKTLRFELKPIGKTLEHIKKSEIIESDETLEEQYAIVK |
| 117 | NIIDRFHRKHIDEALSLVDFTKHLDTFKTIQELYLKRGKTDREKKELEELS |
| | ADLRKLIVSYLKGNVKQKTQHNLNPIKERFEILFGKELFTNEEFFTLAEN |
| | KEEKKAIQAFKGFTTYFKGFQENRKNMYSEEDKSTAIAYRIINENMPLFIE |
| | NIARFQKVLDVIEKTKLTELKQNLKTELKGHSVSDIFRIEYFNNVLTQEGI |
| | SRYNTIIGGKTTTEGVKIQGLNEIINLHNQQSKDVKLPILKPLHKQILSEEY |
| | STSFKIKAFENDNEVLKAIDTFWNEHIEKSIHPVTGKRFNILLKIENLCKKL |
| | EKYKDKEIEKLFIERKNLSTVSHQVYGQWNIIRDALRMHLEMNNKNIKE |
| | KDIDKYLDNDAFAWKEIKDSIKIYKEHVEDAKELDENGIVKYFSSMSINE |
| | EDDEKEYSISLIKNINEKYNNVKSILEEDRTGKSDLHQDKEKVAIIKEFLD |
| | SLKQLQWFLKLLYVTVPLDEKDYEFYNELEVYYEALLPLNSLYNKVRN |
| | YMTRKPYSVEKFKLNFYSPTLLDGWDKNKETANLSIILKKNGKYYLGIM |
| | NKENNTIFENFPKSKSNDYYEKMIYKLLPGPNKMLPKVFFSKKGLEYYK |
| | PSKEILRIYEKGEFKKDKSGNFKKESLHTLIDFYKEAIAKNEDWKIFKFKF |
| | KNTREYEDISQFYRDVEEQGYLIIFEKVDANYVDKLVEEGELYLFQIYNK |
| | DFSENKKSKGNPNLHTIYWESLFDNQNLKDVVYKLNGEAEVFYRKKSID |
| | YPEEIYNNGHHKEELNGKFNYPIIKDRRYTQDKFLFHVPITMNFISKEEKR |
| | VNQLACEYLSTTKEDVHIIGIDRGERHLLYLSLIDKEGNIKKQLSLNTIKN |
| | ENYDKEIDYRVKLDEKEKKRDEARKNWDVIENIKELKEGYMSQVIHIIA |
| | KMMAEEKAILIMEDLNIGFKRGRFKVEKQVYQKFEKMMIDKLNYLVFK |
| | NKEPLEPGGSLNAYQLTSKFDSFKKLGKQSGFIFYVPSAYTSKIDPTTGFY |
| | NFIRVDVPNLEKGKEFFSKFEKIIYNTKEDYFEFHCKYGKFVPEPKNKDN |
| | DRKTKESLTYYNAIKDTVWVVCSTHHERYKIVRNKAGYYESQPVDVTK |
| | NLRDIFSEANINYSDGKDIKPIIIESNNAKLLKSIAEQLKLILAMRYNNGKH |
| | DDDEKDYILSPVKNKQGKFFCSLDGDQSLPINADANGAYNIALKGLLLIE |
| | KIKKQQGKAKDLYISNLEWFMFMMSR |
| SEQ ID NO: | MKSIFDNFTGLYSLSKTLRFELRPVGQTLENIKNGHFLESDKKMADDYQ |
| 118 | DVKKIIDNYHKFFIDDVLKGASFDWALLEKELTDFNKNKTDDSKVEAEQ |
| | KKLREQIAKTLAGDKRFKSLTASTPNDLFNKDKDFIGWLEQSSVKEIRKD |
| | ALDTFKKFSSYFKGFQENRKNVYSADDIPTAVPYRIVNDNFPKFLQNISIF |
| | KTIQEKCPQVIADVENELASYLGKEKLADIFTVQAFNKYLCQGGKENQR |
| | GIDFYNQVIGGIAEKEGGVNLRGINQFLNLYWQQHPDFAKENRRIKMVP |
| | LYKQILSDRSSLSFKIETIDTDEELKTAISEYADKLESKSNDEKKSVLDVC |
| | VELFDSIKEQNLQEIYVNRKDINNISRILTGDWSWLQSRMNLYADEVFTT |
| | KAEKTRWQKSVDGDEGENKSKGAYSLAELNRVLEYASENVAETDIRITD |
| | YFCHRNRFYYEKESGLFKQGEELVALSIKESCEDILSKRKAMNEAFANIS |
| | ESNSLRDNSEDIAKTKTYLDSVQDLLHRIKPLKVNGLGDPSFYAVFDSIY |
| | SALSEVISIYNKTRNYITRKAESPEKYKLNFDNPTLANGWDLNKEKDNTC |
| | VLLRKNGMYYLGIMNPKDKPKFAEKYDCGTESCYEKMIYKLLPGPNKM |
| | LPKVFFSTKGKKQYNPPENILHGYEQGKHKKGVAFDINFCHELIDWFKS |
| | AINQHEDWKKFGFKFSDTKSYKDISDFYREVTEQGYKLTFINIPESEISKM |
| | VSEGKLYLFQIYNMDFAPGANGMPNMHTLYWKNLFSEENLKDVVLKL |
| | NGEAELFYRPAGIKEPVVHAKGSYLVNRITKDGEPIPEKIHDEIYRNANG |
| | NLNNLSKEASEYKESHKVVIKQASHEIIKDRHYTEPKFLFHIPLTINFKAPS |
| | MKPTVCTAIQNENVRRFLKNNPDVNIIGLDRGERNLIYLSLINQKGEIIKQ |
| | FSFNDVEREQNGQTVKVNYHEKLDQREKERDAARKSWQAIGKIAELKE |
| | GYLSAVIHQLTKLMVEYNAIVVMEDLNFGFKRGRFHVEKQVYQKFEHM |
| | LIDKLNYLVFKDRGLNEPGGALNGYQLAGQFESFQKLGKQSGMLFYVP |
| | AAYTSKIDPKTGFVSMMNFKDLTNVHKKRDFFSKFEDIHFDEATCSFVFT |
| | FDYKNINGKAKEEMKQTKWAVYSREKRIVYFSKTKSSEDIMPTEKLRAL |
| | FESDGIEYKSGNNIHDSVMAVGADLKEGAKPSKEIADFWDGLLYNFKLI |
| | LQMRNSNAKTGEDYIISPVMASDGTFFDSRVEAKKGKDAKLPLDADAN |
| | GAYHIALKGLSLINKINLAGEDELKKFDMKISNEDWFNFAQEKKYAE |
| SEQ ID NO: | MTKQNKSVTQNTKRKNFGEFTNLYSLSKTLRFELKPVKATKTILEVERK |
| 119 | DRENFKKDRKIAKNYQKLKGILNELHQEFIQDVMREFSFQEKEIKEFEER |
| | YLEALNFKEKDNYKKRTQLKNAYEKVAKKLAGKIATAFGKYNQEKYG |
| | VKFTKKNLTGENVFDILEGKYKGDKKILGIIHTFKFKPTKEEKKQGKEAV |
| | NFSTYLGGFNQNRENFYKGEMKAGQFATRTIENLIQFLKNKKLFIDKYK |
| | DNYQKIGFSQEQVEIFNLNYFNNLFLQEGLDVYNGILGAKKGEKNTEND |
| | GLNQKINLFKQKEKTRCKANGEKFNKSDYPIFKELYKQIGSIKKDNDVY |
| | VEIKSDEELVNVLQSLPEKTANTLREVQKFYENFFDKIFNDEFDLDKIYLP |
| | KSVGTHFSHLAFSDWSKLAFVFNKRWRNEKVKIKEGEDVNVQSRSLADI |
| | KKRMEEILEMDGGVSFGKTYCQKVGLEKEARTIEDVWSGFWKIIQYHIN |
| | SQFIGGEKEVFDKEKKDDKTEKIQTIDDLQEEYLQATEMYRERMVESEE |
| | GLNDGEEKEIKTKLKNYLDRIKDIERIARYFDLRKHFDDIDEASKDGDFY |
| | FIYQELLQDISEAKINDHYNEIRNYLTKANVVDDKFKLNFNDGQTLSGW |
| | DLNKETEKFSLIFKRKVDGGVEYYLGIINKEKNKTIFDKKKHPEIFTENSE |
| | FEKMEYKLFPSPSKMLPKIAFTKNKEGERIKPVFLDENAGKEIAQIKKEFA |
| | LFQDAKKEDKNKWSDEFDRKKLNKLIDYYKLVLEKHPEKYMQTFNFVF |
| | KSSAKYKNLGEFNDDVARQNYVTKFVSVDKDYIDQKVESGELYLFKIH |
| | NKDWNLTKAGDTKKQSKKNLHTIYFEELFSEKNIAEPVFKLSGGAEVFF |
| | RDAIEKKKQKKKKDKKGKEILEKFRFTKNKILFHVPITINYGKPSINQGQF |
| | NQKINEFIADNSRSVNILGIDRGEKHLLYYSLVDNNGKIIKSGSLNEINGV |
| | DYHEKLDKAEKERQEARKSWQKINQIKNLKAGYISQVIKKIVDLAIENN |
| | AIIVLEDLNFGFKSFRQKIEKNVYQQFEKALIDKLGFVTDKEKLNHRQAP |
| | QLSAPFESFEKMGKQTGIVFYVLATNTSKVCPQCQWKKNIFPHYSTKKSI |
| | AENLQKQYKMKMYWRENENRFEFEYKGDGDKEFSSIFSNVDRVRYDK |
| | RANNNQGGYVIYQIDSTTKEKDGRNIKEKSITNLLKELLLEKFEIDNLEGE |
| | LLVKLSEKSPDVSKETIKDFFGLLNSILNIRNSMTDTEEDYIQCPACGFDT |
| | RKENKIGIKNGDDNGAYNIALRGRFLIERIKKAKKEDKKPNLTFSNNDYF |
| | QWVREFVK |
| SEQ ID NO: | MRTTTSLDAFTNRYALSKTLRFELKPIGNTQMMLEQNNVFAKDRAIREK |
| 120 | YEKTKPWIDLLHREFVAESLQNAQLGNLDDYYAALQNVQKITKDTNAE |
| | DKKRWKKGFEKQEKRLRKEVVALFDKAAHIWATQRYPQLKKKTKDFL |
| | FEEGVFEHVLFARYGSAPDTTVKIVTSNPETGEVIDEREESIFKGWKGFTG |
| | YFDKFFETRKNFYKDNGTATAIATRAINQNLRRFAENMQKLTDIKNNYP |
| | ELLAHTDFGDFDIAHAQSLDFYARTCLLQEGIDAYNKKFVGVLKSAINE |
| | YQQKNKGVRISYPKTLDNQILGERERRLFDVIEDDRELHDVFRAFVDDG |
| | TVFAAEMRQLAQAFSAQNGTYDYTQIYISKKGFETISRKYTHDTRAWHD |
| | ALADVFKAKAKKRIATTASGEKKFPAYIPVAYITQALTLVQESEDTECT |
| | WKERYASITENKTLEEGFFAIFADEFERLFVHMEATVQDTDYVVAEDKA |
| | KKLLSDGQITKNEQTTQIIKEYADALLRIYQMAKYFAVEKKSMWDDAV |
| | AIDDTFYETFKEIYGNTHSTIVASYNLLRNYLTKKPWEDVQKWKLNFEN |
| | PTLLDGWDKNKEAANFGVILRDGDKFYLGIMRKGHNNIFANQHHSNFE |
| | GQGLQKMVYKFFPDPKKMFPKVCFSAKGMEFFAPSEEIVRIYKNAEFKS |
| | GDTFNVESMQKLIDFYKNALQKYDGWKIYDFKHLKDTAQYTSNIGEFY |
| | DDVAKGGYQLGWQNISKEYVEEKNANGELYLFQIKNKDWNDGATGRK |
| | NLHTLYFEYLFSEKNAAADFVFRLNGGAEVFYRPAAIESKTERRGNREV |
| | AAKKRYTQDKVFLHVPITLNRTAGDVKTSAFNDAVNRFLAGNPDINIMG |
| | IDRGEKHLAYYSIIDQNGNRIVSGSFNTIGSKDYHALLTERQGAREEARK |
| | NWQRVEQIKDLKKGYISLVVREIADLAIKHNAIIVLENLNMRFKQIRGGIE |
| | KSVYQQLEKALIEKLNFLVNKGEVDATKAGHLLRAYQLAAPFETFEKM |
| | GNQTGIIFYTTASYTSQVDPVTGWRPHVYLKYRNAQKTKEDILRIFDDIV |
| | FNDEKQRFEFAYRHNGVSWTVCSSVERHRWNRSNNAGKGGYDVFPVE |
| | GEGSITQRLQEACAQRGIDTTRNILAQIDELDESASATVSFLRDLCFYFRLI |
| | CQIRNTDDGADDINAQDFLMSPVEPFFDTRNAQEQYPQNGDENGAYNIA |
| | RKGIIILQKITAWGRSQDTQRRYPDTFVSQDEWDTFLTQHTT |
| SEQ ID NO: | MLKEKQFKTFGDFTNLYELSKTLRFELRPTPETKDLLDKNKIIQTDKKIAE |
| 121 | NYQEIKKYFDKLHKKFIKEALSNTQIDFSDFCKLWEQNSKDSGKIKDLSR |
| | KLRKSIKQAFDKKGADWHKRYLEKGIKLKKKNLDILFEERVLDILKEEF |
| | KDDVDVKLFESFKGFSTYFTNFHESRKNFYKDDGTASAIATRIIDENLKR |
| | FCDNIKVKKHSKKLISELNEREAKIFEADFYNRCLLQQGIDDYNQVIGDIN |
| | KKINNLRQNKIENTPTLKILYKQILGDVRRQETEQDAFIEIKNNEEVFDFL |
| | QDFIKHSDENNKYFKNLFYKFIEGKHSLDKIFLAKRFVNTISGKWFASWE |
| | VFGAELIKKFGNKKDLPDFIPFAAVKDVLQNCNIPANELFKEKIKNDEDK |
| | NIYDIFINLWKEEFDSNLKKVEESKKEVENMIAEDKVYSNKKEKRKNDN |
| | GEEIEIEIQKEKIKNYADAAMNIFRMMKYFLLEKNGKTVEGMGEDNNFY |
| | NELNIVFKGGEIDGKVYEGVKTYLYYNEFRNYLTKKPFNEEKTKLNFDC |
| | GQILSGWDKNKESEKLGVILRKDNKYYLAIINKKHNKIFDVKKNSYAYI |
| | VGDNFYEKMEYKLFPDAKRMIPKIAFAKNNKEKFGWTDEIQKIKNEYAE |
| | FQEGKKNDKNLWKDKFNKNKMEKLITYYQNCLEKGGYKDIYNFRWKS |
| | PDKYSGIGEFNDEIDRQSYCLKFVKVDFNYVFEKVKSGELYLFQIYNKDF |
| | SDKADRAQKENIHTEYFKLLFDQRNLDNVVLKLSGGAEIFYRPKTEGLP |
| | KKKDNKGNEVVRHRRYADDKYFLHLPIQLNFGRGNLSGGEFNSKINQY |
| | LSEQREIKIIGIDRGEKHLAYYSVINQDGKIEEIESLNTVNGIDYRKKLDEL |
| | EKKREQERKSWQSISKIKDLKKGYISHVIKKICDLAIEHNAIIVFEDLSGGF |
| | KNSRKKIEKQIYQNLELALATKLNYLTFKDKNFGESGHYLNAYQLAPKI |
| | DNYQDIKMQTGIVFYTPAGYTSSTCPQCGFRKTLKFDYTATISKAEDLIR |
| | GSKLNIVFEKEKNRFKINYLFNPIEKKKKKIKENELFADAGAKNEFTIYSD |
| | VKRIKWHNTGTKRLEEAEGERLLENKNSRGRDKEYDINKCLTRLFRENK |
| | IDVNGDIIGQITKIKSLKLYQDLFYYLFLATLIRNNVSGSDIDYIQCPSCHF |
| | HSDGGFQKQKFNGDANGAYNIARKGILILKKIKQFAAQDKDMKNFGWK |
| | HLTVDINEWDKFTQK |
| SEQ ID NO: | MNKNFSNFTELYTLSKTLRFELKPVAQTKENIKKGKFLESDKKKADDYK |
| 122 | DVKKIIDNYHKFFIDDVLKNASFDWTVLEKEMSDFNKSKADDSKVEAEQ |
| | KKLRDQIAKKLTSDKRFKALTASTPSDLFNKDKDFIDWFTQNSTKDINKE |
| | ALETFKRFSSYFKGFQENRKNVYSAEPIPTAVPYRLVNDNFPKFLQNIALF |
| | KIIQEKCPQVISDVEKELASYLGKEKLADIFTVQAFNKYLCQGGKENQRG |
| | IDFYNNILGGIAEKEGGINLRGINQFLNLYWQQHQDFAKQNKRIKMIPLF |
| | KQILSDRSSLSFKIESINTDQELLTSITEYADKLETKSNDEKKSVLDICSDL |
| | FASIKAQNLQEIYVNRKDINSISRILTGDWSWLQSRMNVYADEVFTTKAE |
| | KTRWQKSIDGDEGENKSKGVFSLAELNSVLEYSSENVSETDVRITDFFDH |
| | RNRFYYEKESGLFKQGDELVALSIRESCEDILAKRKAMDEAFANVSENN |
| | SLRDNSEDVAKIKIYLDCVQELLHRIKPLKVNGLGDPAFYAVFDTVYNSL |
| | SEVISLYNKTRNYITKKAANPEKYKLNFDNPTLADGWDLNKEQANTSVL |
| | MRKDGMYYLGIMNPKDKPKFAEKYECGNEACYEKMIYKQFDATKQIPK |
| | CSTQVKEVKKHFQSGATDSIILNDKSKFKLDLVITKEIWFLNNHVWNGE |
| | KFVPKRESNETRPKKFQIGYYKQTGDLGGYKEALNIWISFCKTFLQSYISS |
| | SIYDYDFKESSNYDSLDEFYNYLNATCYKLSFINIPEATISQMVSEGKLYL |
| | FQIYNKDFAPGASGMPNMHTLYWKNLFSEENLKNVVLKLNGEAELFYR |
| | PAGIKEPVIHAKGSYLVNRITKDGEPIPEKIHDEIYRNANGKLESLSKEAT |
| | EYKASHKVVIKEAKHDIIKDRHYTEPKFLFHVPLTINFKASGNSYINENVR |
| | RFLKNNPDVNVIGLDRGERHLIYLSLINQKGEIIKQFTFNEVERNKNGQVI |
| | KVNYHEKLDQREKVRGAARKSWQAIGKIAELKEGYLSAVIHQLTKLMV |
| | EYNAIVVMEDLNFGFKRGRFHVEKQVYQKFEHMLIDKLNYLVFKDRGL |
| | TEAGGVLNGYQLAGQFESFQKLGKQSGMLFYVPAGYTSKIDPKTGFAS |
| | MSNFKDLTNVHKKRAFFSKFDDIHFDDATGSFVFTFDYKNFDGKAKEE |
| | MKRTKWSVYSKDKRIVYLSKTKSYEDVQPTEKIKASLESVGIEYMSGNN |
| | LIDSIMVIGAELKDGAKPSKEIADFWDRLLYNFKLILQMRNSNAKTGEDY |
| | IISPVMADDGTFFDSREEFKKGENAKMPVDADANGAYHIALKGLSLLKR |
| | FDAASENELKKFDMKISNVDWFKFAQEKSYAE |
| SEQ ID NO: | MKAKKSFYNQKRKFGKRGYRLHDERIAYSGGIGSMRSIKYELKDSYGIA |
| 123 | GLRNRIADATISDNKWLYGNINLNDYLEWRSSKTDKQIEDGDRESSLLGF |
| | WLEALRLGFVFSKQSHAPNDFNETALQDLFETLDDDLKHVLDRKKWCD |
| | FIKIGTPKTNDQGRLKKQIKNLLKGNKREEIEKTLNESDDELKEKINRIAD |
| | VFAKNKSDKYTIFKLDKPNTEKYPRINDVQVAFFCHPDFEEITERDRTKT |
| | LDLIINRFNKRYEITENKKDDKTSNRMALYSLNQGYIPRVLNDLFLFVKD |
| | NEDDFSQFLSDLENFFSFSNEQIKIIKERLKKLKKYAEPIPGKPQLADKWD |
| | DYASDFGGKLESWYSNRIEKLKKIPESVSDLRNNLEKIRNVLKKQNNAS |
| | KILELSQKIIEYIRDYGVSFEKPEIIKFSWINKTKDGQKKVFYVAKMADRE |
| | FIEKLDLWMADLRSQLNEYNQDNKVSFKKKGKKIEELGVLDFALNKAK |
| | KNKSTKNENGWQQKLSESIQSAPLFFGEGNRVRNEEVYNLKDLLFSEIK |
| | NVENILMSSEAEDLKNIKIEYKEDGAKKGNYVLNVLARFYARFNEDGYG |
| | GWNKVKTVLENIAREAGTDFSKYGNNNNRNAGRFYLNGRERQVFTLIK |
| | FEKSITVEKILELVKLPSLLDEAYRDLVNENKNHKLRDVIQLSKTIMALV |
| | LSHSDKEKQIGGNYIHSKLSGYNALISKRDFISRYSVQTTNGTQCKLAIGK |
| | GKSKKGNEIDRYFYAFQFFKNDDSKINLKVIKNNSHKNIDENDNENKINA |
| | LQVYSSNYQIQFLDWFFEKHQGKKTSLEVGGSFTIAEKSLTIDWSGSNPR |
| | VGFKRSDTEEKRVFVSQPFTLIPDDEDKERRKERMIKTKNRFIGIDIGEYG |
| | LAWSLIEVDNGDKNNRGIRQLESGFITDNQQQVLKKNVKSWRQNQIRQT |
| | FTSPDTKIARLRESLIGSYKNQLESLMVAKKANLSFEYEVSGFEVGGKRV |
| | AKIYDSIKRGSVRKKDNNSQNDQSWGKKGINEWSFETTAAGTSQFCTHC |
| | KRWSSLAIVDIEEYELKDYNDNLFKVKINDGEVRLLGKKGWRSGEKIKG |
| | KELFGPVKDAMRPNVDGLGMKIVKRKYLKLDLRDWVSRYGNMAIFICP |
| | YVDCHHISHADKQAAFNIAV |
| SEQ ID NO: | MKLTRRRISGNSVDQKITAAFYRDMSQGLLYYDSEDNDCTDKVIESMDF |
| 124 | ERSWRGRILKNGEDDKNPFYMFVKGLVGSNDKIVCEPIDVDSDPDNLDI |
| | LINKNLTGFGRNLKAPDSNDTLENLIRKIQAGIPEEEVLPELKKIKEMIQK |
| | DIVNRKEQLLKSIKNNRIPFSLEGSKLVPSTKKMKWLFKLIDVPNKTFNE |
| | KMLEKYWEIYDYDKLKANITNRLDKTDKKARSISRAVSEELREYHKNLR |
| | TNYNRFVSGDRPAAGLDNGGSAKYNPDKEEFLLFLKEVEQYFKKYFPV |
| | KSKHSNKSKDKSLVDKYKNYCSYKVVKKEVNRSIINQLVAGLIQQGKLL |
| | YYFYYNDTWQEDFLNSYGLSYIQVEEAFKKSVMTSLSWGINRLTSFFIDD |
| | SNTVKFDDITTKKAKEAIESNYFNKLRTCSRMQDHFKEKLAFFYPVYVK |
| | DKKDRPDDDIENLIVLVKNAIESVSYLRNRTFHFKESSLLELLKELDDKN |
| | SGQNKIDYSVAAEFIKRDIENLYDVFREQIRSLGIAEYYKADMISDCFKTC |
| | GLEFALYSPKNSLMPAFKNVYKRGANLNKAYIRDKGPKETGDQGQNSY |
| | KALEEYRELTWYIEVKNNDQSYNAYKNLLQLIYYHAFLPEVRENEALIT |
| | DFINRTKEWNRKETEERLNTKNNKKHKNFDENDDITVNTYRYESIPDYQ |
| | GESLDDYLKVLQRKQMARAKEVNEKEEGNNNYIQFIRDVVVWAFGAY |
| | LENKLKNYKNELQPPLSKENIGLNDTLKELFPEEKVKSPFNIKCRFSISTFI |
| | DNKGKSTDNTSAEAVKTDGKEDEKDKKNIKRKDLLCFYLFLRLLDENEI |
| | CKLQHQFIKYRCSLKERRFPGNRTKLEKETELLAELEELMELVRFTMPSIP |
| | EISAKAESGYDTMIKKYFKDFIEKKVFKNPKTSNLYYHSDSKTPVTRKY |
| | MALLMRSAPLHLYKDIFKGYYLITKKECLEYIKLSNIIKDYQNSLNELHE |
| | QLERIKLKSEKQNGKDSLYLDKKDFYKVKEYVENLEQVARYKHLQHKI |
| | NFESLYRIFRIHVDIAARMVGYTQDWERDMHFLFKALVYNGVLEERRFE |
| | AIFNNNDDNNDGRIVKKIQNNLNNKNRELVSMLCWNKKLNKNEFGAII |
| | WKRNPIAHLNHFTQTEQNSKSSLESLINSLRILLAYDRKRQNAVTKTIND |
| | LLLNDYHIRIKWEGRVDEGQIYFNIKEKEDIENEPIIHLKHLHKKDCYIYK |
| | NSYMFDKQKEWICNGIKEEVYDKSILKCIGNLFKFDYEDKNKSSANPKH |
| | T |
| SEQ ID NO: | MLRRDKEVKKLYNVFNQIQVGTKPKKWNNDEKLSPEENERRAQQKNIK |
| 125 | MKNYKWREACSKYVESSQRIINDVIFYSYRKAKNKLRYMRKNEDILKK |
| | MQEAEKLSKFSGGKLEDFVAYTLRKSLVVSKYDTQEFDSLAAMVVFLE |
| | CIGKNNISDHEREIVCKLLELIRKDFSKLDPNVKGSQGANIVRSVRNQNMI |
| | VQPQGDRFLFPQVYAKENETVINKNVEKEGLNEFLLNYANLDDEKRAE |
| | SLRKLRRILDVYFSAPNHYEKDMDITLSDNIEKEKFNVWEKHECGKKET |
| | GLFVDIPDVLMEAEAENIKLDAVVEKRERKVLNDRVRKQNIICYRYTRA |
| | VVEKYNSNEPLFFENNAINQYWIHHIENAVERILKNCKAGKLFKLRKGY |
| | LAEKVWKDAINLISIKYIALGKAVYNFALDDIWKDKKNKELGIVDERIRN |
| | GITSFDYEMIKAHENLQRELAVDIAFSVNNLARAVCDMSNLGNKESDFL |
| | LWKRNDIADKLKNKDDMASVSAVLQFFGGKSSWDINIFKDAYKGKKKY |
| | NYEVRFIDDLRKAIYCARNENFHFKTALVNDEKWNTELFGKIFERETEFC |
| | LNVEKDRFYSNNLYMFYQVSELRNMLDHLYSRSVSRAAQVPSYNSVIV |
| | RTAFPEYITNVLGYQKPSYDADTLGKWYSACYYLLKEIYYNSFLQSDRA |
| | LQLFEKSVKTLSWDDKKQQRAVDNFKDHFSDIKSACTSLAQVCQIYMTE |
| | YNQQNNQIKKVRSSNDSIFDQPVYQHYKVLLKKAIANAFADYLKNNKD |
| | LFGFIGKPFKANEIREIDKEQFLPDWTSRKYEALCIEVSGSQELQKWYIVG |
| | KFLNARSLNLMVGSMRSYIQYVTDIKRRAASIGNELHVSVHDVEKVEK |
| | WVQVIEVCSLLASRTSNQFEDYFNDKDDYARYLKSYVDFSNVDMPSEY |
| | SALVDFSNEEQSDLYVDPKNPKVNRNIVHSKLFAADHILRDIVEPVSKDN |
| | IEEFYSQKAEIAYCKIKGKEITAEEQKAVLKYQKLKNRVELRDIVEYGEII |
| | NELLGQLINWSFMRERDLLYFQLGFHYDCLRNDSKKPEGYKNIKVDENS |
| | IKDAILYQIIGMYVNGVTVYAPEKDGDKLKEQCVKGGVGVKVSAFHRY |
| | SKYLGLNEKTLYNAGLEIFEVVAEHEDIINLRNGIDHFKYYLGDYRSMLS |
| | IYSEVFDRFFTYDIKYQKNVLNLLQNILLRHNVIVEPILESGFKTIGEQTKP |
| | GAKLSIRSIKSDTFQYKVKGGTLITDAKDERYLETIRKILYYAENEEDNLK |
| | KSVVVTNADKYEKNKESDDQNKQKEKKNKDNKGKKNEETKSDAEKNN |
| | NERLSYNPFANLNFKLSN |

[0271] Other Exemplary protein sequences are described in the following applications: PCT/US2021/033271; PCT/US2021/035031, and PCT/US2022/028865, all of which are herein incorporated by reference in their entirety.

[0272] In some instances, the Type V CRISPR/Cas protein has been modified (also referred to as an engineered protein). For example, a Type V CRISPR/Cas protein disclosed herein or a variant thereof may comprise a nuclear localization signal (NLS). In some cases, the NLS may comprise a sequence of KRPAATKKAGQAKKKKEF (SEQ ID NO: 128). Type V CRISPR/Cas proteins may be codon optimized for expression in a specific cell, for example, a bacterial cell, a plant cell, a eukaryotic cell, an animal cell, a mammalian cell, or a human cell. In some embodiments, the Type V CRISPR/Cas protein is codon optimized for a human cell.

[0273] In some instances, the Type V CRISPR/Cas protein has been modified (also referred to as an engineered protein). For example, a Type V CRISPR/Cas protein disclosed herein or a variant thereof may comprise a nuclear localization signal (NLS). In some cases, the NLS may comprise a sequence of KRPAATKKAGQAKKKKEF (SEQ ID NO: 128). Type V CRISPR/Cas proteins may be codon optimized for expression in a specific cell, for example, a bacterial cell, a plant cell, a eukaryotic cell, an animal cell, a mammalian cell, or a human cell. In some embodiments, the Type V CRISPR/Cas protein is codon optimized for a human cell.

### Cas14 Proteins

[0274] In some instances, the TypeV CRISPR/Cas protein comprises a Cas14 protein. Cas14 proteins may comprise a bilobed structure with distinct amino-terminal and carboxy-terminal domains. The amino- and carboxy-terminal domains may be connected by a flexible linker. The flexible linker may affect the relative conformations of the amino- and carboxyl-terminal domains. The flexible linker may be short, for example less than 10 amino acids, less than 8 amino acids, less than 6 amino acids, less than 5 amino acids, or less than 4 amino acids in length. The flexible linker may be sufficiently long to enable different conformations of the amino- and carboxy-terminal domains among two Cas14 proteins of a Cas14 dimer complex (e.g., the relative orientations of the amino- and carboxy-terminal domains differ between two Cas14 proteins of a Cas14 homodimer complex). The linker domain may comprise a mutation which affects the relative conformations of the amino- and carboxyl-terminal domains. The linker may comprise a mutation which affects Cas14 dimerization. For example, a linker mutation may enhance the stability of a Cas14 dimer.

[0275] In some instances, the amino-terminal domain of a Cas14 protein comprises a wedge domain, a recognition domain, a zinc finger domain, or any combination thereof. The wedge domain may comprise a multi-strand β-barrel structure. A multi-strand β-barrel structure may comprise an oligonucleotide/oligosaccharide-binding fold that is structurally comparable to those of some Cas12 proteins. The recognition domain and the zinc finger domain may each (individually or collectively) be inserted between β-barrel strands of the wedge domain. The recognition domain may comprise a 4-α-helix structure, structurally comparable but shorter than those found in some Cas12 proteins. The recognition domain may comprise a binding affinity for a guide nucleic acid or for a guide nucleic acid-target nucleic acid heteroduplex. In some cases, a REC lobe may comprise a binding affinity for a PAM sequence in the target nucleic acid. The amino-terminal may comprise a wedge domain, a recognition domain, and a zinc finger domain. The carboxy-terminal may comprise a RuvC domain, a zinc finger domain, or any combination thereof. The carboxy-terminal may comprise one RuvC and one zinc finger domain.

[0276] Cas 14 proteins may comprise a RuvC domain or a partial RuvC domain. The RuvC domain may be defined by a single, contiguous sequence, or a set of partial RuvC domains that are not contiguous with respect to the primary amino acid sequence of the Cas 14 protein. In some instances, a partial RuvC domain does not have any substrate binding activity or catalytic activity on its own. A Cas14 protein of the present disclosure may include multiple partial RuvC domains, which may combine to generate a RuvC domain with substrate binding or catalytic activity. For example, a Cas14 may include 3 partial RuvC domains (RuvC-I, RuvC-II, and RuvC-III, also referred to herein as subdomains) that are not contiguous with respect to the primary amino acid sequence of the Cas 14 protein, but form a RuvC domain once the protein is produced and folds. A Cas14 protein may comprise a linker loop connecting a carboxy terminal domain of the Cas 14 protein with the amino terminal domain of the Cas 14 protein, and wherein the carboxy terminal domain comprises one or more RuvC domains and the amino terminal domain comprises a recognition domain.

[0277] Cas 14 proteins may comprise a zinc finger domain. In some instances, a carboxy terminal domain of a Cas 14 protein comprises a zinc finger domain. In some instances, an amino terminal domain of a Cas14 protein comprises a zinc finger domain. In some instances, the amino terminal domain comprises a wedge domain (e.g., a multi-β-barrel wedge structure), a zinc finger domain, or any combination thereof. In some cases, the carboxy terminal domain comprises the RuvC domains and a zinc finger domain, and the amino terminal domain comprises a recognition domain, a wedge domain, and a zinc finger domain.

[0278] Cas 14 proteins may be relatively small compared to many other Cas proteins, making them suitable for nucleic acid detection or gene editing. For instance, a Cas14 protein may be less likely to adsorb to a surface or another biological species due to its small size. The smaller nature of these proteins also allows for them to be more easily packaged as a reagent in a system or assay, and delivered with higher efficiency as compared to other larger Cas proteins. In some cases, a Cas14 protein is 400 to 800 amino acid residues long, 400 to 600 amino acid residues long, 440 to 580 amino acid residues long, 460 to 560 amino acid residues long, 460 to 540 amino acid residues long, 460 to 500 amino acid residues long, 400 to 500 amino acid residues long, or 500 to 600 amino acid residues long. In some cases, a Cas14 protein is less than about 550 amino acid residues long. In some cases, a Cas14 protein is less than about 500 amino acid residues long.

[0279] In some instances, a Cas 14 protein may function as an endonuclease that catalyzes cleavage at a specific position within a target nucleic acid. In some instances, a Cas14 protein is capable of catalyzing non-sequence-specific cleavage of a single stranded nucleic acid. In some cases, a Cas 14 protein is activated to perform trans cleavage activity after binding of a guide nucleic acid with a target nucleic acid. This trans cleavage activity is also referred to as “collateral” or “transcollateral” cleavage. Trans cleavage activity may be non-specific cleavage of nearby single-stranded nucleic acid by the activated programmable nuclease, such as trans cleavage of detector nucleic acids with a detection moiety.

### Engineered Programmable Nuclease Probes

[0280] Disclosed herein are non-naturally occurring compositions and systems comprising at least one of an engineered Cas protein and an engineered guide nucleic acid, which may simply be referred to herein as a Cas protein and a guide nucleic acid, respectively. In general, an engineered Cas protein and an engineered guide nucleic acid refer to a Cas protein and a guide nucleic acid, respectively, that are not found in nature. In some instances, systems and compositions comprise at least one non-naturally occurring component. For example, compositions and systems may comprise a guide nucleic acid, wherein the sequence of the guide nucleic acid is different or modified from that of a naturally-occurring guide nucleic acid. In some instances, compositions and systems comprise at least two components that do not naturally occur together. For example, compositions and systems may comprise a guide nucleic acid comprising a repeat region and a spacer region which do not naturally occur together. Also, by way of example, composition and systems may comprise a guide nucleic acid and a Cas protein that do not naturally occur together. Conversely, and for clarity, a Cas protein or guide nucleic acid that is “natural,” “naturally-occurring,” or “found in nature” includes Cas proteins and guide nucleic acids from cells or organisms that have not been genetically modified by a human or machine.

[0281] In some instances, the guide nucleic acid may comprise a non-natural nucleobase sequence. In some instances, the non-natural sequence is a nucleobase sequence that is not found in nature. The non-natural sequence may comprise a portion of a naturally occurring sequence, wherein the portion of the naturally occurring sequence is not present in nature absent the remainder of the naturally-occurring sequence. In some instances, the guide nucleic acid may comprise two naturally occurring sequences arranged in an order or proximity that is not observed in nature. In some instances, compositions and systems comprise a ribonucleotide complex comprising a CRISPR/Cas effector protein and a guide nucleic acid that do not occur together in nature. Engineered guide nucleic acids may comprise a first sequence and a second sequence that do not occur naturally together. For example, an engineered guide nucleic acid may comprise a sequence of a naturally occurring repeat region and a spacer region that is complementary to a naturally occurring eukaryotic sequence. The engineered guide nucleic acid may comprise a sequence of a repeat region that occurs naturally in an organism and a spacer region that does not occur naturally in that organism. An engineered guide nucleic acid may comprise a first sequence that occurs in a first organism and a second sequence that occurs in a second organism, wherein the first organism and the second organism are different. The guide nucleic acid may comprise a third sequence disposed at a 3′ or 5′ end of the guide nucleic acid, or between the first and second sequences of the guide nucleic acid. For example, an engineered guide nucleic acid may comprise a naturally occurring crRNA and tracrRNA coupled by a linker sequence.

[0282] In some instances, compositions and systems described herein comprise an engineered Cas protein that is similar to a naturally occurring Cas protein. The engineered Cas protein may lack a portion of the naturally occurring Cas protein. The Cas protein may comprise a mutation relative to the naturally-occurring Cas protein, wherein the mutation is not found in nature. The Cas protein may also comprise at least one additional amino acid relative to the naturally-occurring Cas protein. For example, the Cas protein may comprise an addition of a nuclear localization signal relative to the natural occurring Cas protein. In certain embodiments, the nucleotide sequence encoding the Cas protein is codon optimized (e.g., for expression in a eukaryotic cell) relative to the naturally occurring sequence.

[0283] In some instances, compositions and systems provided herein comprise a multi-vector system encoding a Cas protein and a guide nucleic acid described herein, wherein the guide nucleic acid and the Cas protein are encoded by the same or different vectors. In some embodiments, the engineered guide and the engineered Cas protein are encoded by different vectors of the system.

### Programmable Nuclease Fusion Proteins

[0284] Described herein are various embodiments of programmable nuclease fusion proteins. In some embodiments, a programmable nuclease may be fused with a heterologous polypeptide to form a programmable nuclease fusion protein. In some instances, “fusion partner” can refer to a polypeptide that is fused to another polypeptide. In some embodiments, the heterologous polypeptide may be an enzyme, wherein the enzyme is configured to react an enzyme substrate to generate a detectable signal. In some embodiments, the heterologous polypeptide may provide a tag (i.e., the heterologous polypeptide is a detectable label) for ease of tracking and/or purification (e.g., a fluorescent protein, e.g., green fluorescent protein (GFP), YFP, RFP, CFP, mCherry, tdTomato, and the like; a histidine tag, e.g., a 6×His tag (SEQ ID NO: 129); a hemagglutinin (HA) tag; a FLAG tag; a Myc tag; and the like).

[0285] “Heterologous,” as used herein, can refer to a nucleotide or polypeptide sequence that is not found in the native nucleic acid or protein, respectively. In some cases, a heterologous polypeptide may comprise a sequence different from a sequence of a given protein. For example, a sequence of an HRP enzyme may be considered heterologous to a sequence of a programmable nuclease when the sequence of the HRP enzyme is different from the sequence of the programmable nuclease. In some embodiments, a programmable nuclease (e.g., a Cas12 protein) can be fused to an active domain from a non-programmable nuclease protein (e.g., an HRP), and the sequence of the active domain may be considered to be a heterologous polypeptide (i.e., it is heterologous to the programmable nuclease).

### Thermostable Programmable Nuclease

[0286] Described herein are various embodiments of thermostable programmable nucleases. In some embodiments, a programmable nuclease is referred to as an effector protein. An effector protein may be thermostable. In some instances, known effector proteins (e.g., Cas12 nucleases) are relatively thermo-sensitive and only exhibit activity (e.g., cis and/or trans cleavage) sufficient to produce a detectable signal in a diagnostic assay at temperatures less than 40° C., and optimally at about 37° C. A thermostable protein may have enzymatic activity, stability, or folding comparable to those at 37° C. In some instances, the trans cleavage activity (e.g., the maximum trans cleavage rate as measured by fluorescent signal generation) of an effector protein in a trans cleavage assay at 40° C. may be at least 50% of that at 37° C. In some instances, the trans cleavage activity of an effector protein in a trans cleavage assay at 40° C. may be at least 55% of that at 37° C. In some instances, the trans cleavage activity of an effector protein in a trans cleavage assay at 40° C. may be at least 60% of that at 37° C. In some instances, the trans cleavage activity of an effector protein in a trans cleavage assay at 40° C. may be at least 65% of that at 37° C. In some instances, the trans cleavage activity of an effector protein in a trans cleavage assay at 40° C. may be at least 70% of that at 37° C. In some instances, the trans cleavage activity of an effector protein in a trans cleavage assay at 40° C. may be at least 75% of that at 37° C. In some instances, the trans cleavage activity of an effector protein in a trans cleavage assay at 40° C. may be at least 80% of that at 37° C. In some instances, the trans cleavage activity of an effector protein in a trans cleavage assay at 40° C. may be at least 85% of that at 37° C. In some instances, the trans cleavage activity of an effector protein in a trans cleavage assay at 40° C. may be at least 90% of that at 37° C. In some instances, the trans cleavage activity of an effector protein in a trans cleavage assay at 40° C. may be at least 95% of that at 37° C. In some instances, the trans cleavage activity of an effector protein in a trans cleavage assay at 40° C. may be at least 100% of that at 37° C. In some instances, the trans cleavage activity of an effector protein in a trans cleavage assay at 40° C. may be at least 1-fold of that at 37° C. In some instances, the trans cleavage activity of an effector protein in a trans cleavage assay at 40° C. may be at least 2-fold of that at 37° C. In some instances, the trans cleavage activity of an effector protein in a trans cleavage assay at 40° C. may be at least 3-fold of that at 37° C. In some instances, the trans cleavage activity of an effector protein in a trans cleavage assay at 40° C. may be at least 4-fold of that at 37° C. In some instances, the trans cleavage activity of an effector protein in a trans cleavage assay at 40° C. may be at least 5-fold of that at 37° C. In some instances, the trans cleavage activity of an effector protein in a trans cleavage assay at 40° C. may be at least 6-fold of that at 37° C. In some instances, the trans cleavage activity of an effector protein in a trans cleavage assay at 40° C. may be at least 7-fold of that at 37° C. In some instances, the trans cleavage activity of an effector protein in a trans cleavage assay at 40° C. may be at least 8-fold of that at 37° C. In some instances, the trans cleavage activity of an effector protein in a trans cleavage assay at 40° C. may be at least 9-fold of that at 37° C. In some instances, the trans cleavage activity of an effector protein in a trans cleavage assay at 40° C. may be at least 10-fold of that at 37° C. In some instances, the trans cleavage activity of an effector protein in a trans cleavage assay at 40° C. may be at least 11-fold, at least 12-fold, at least 13-fold, at least 14-fold, at least 15-fold, at least 20-fold, at least 25-fold, at least 30-fold, at least 35-fold, at least 40-fold, at least 45-fold, at least 50-fold or more of that at 37° C.

[0287] In some instances, the trans cleavage activity of an effector protein in a trans cleavage assay at 45° C. may be at least 50% of that at 37° C. In some instances, the trans cleavage activity of an effector protein in a trans cleavage assay at 45° C. may be at least 55% of that at 37° C. In some instances, the trans cleavage activity of an effector protein in a trans cleavage assay at 45° C. may be at least 60% of that at 37° C. In some instances, the trans cleavage activity of an effector protein in a trans cleavage assay at 45° C. may be at least 65% of that at 37° C. In some instances, the trans cleavage activity of an effector protein in a trans cleavage assay at 45° C. may be at least 70% of that at 37° C. In some instances, the trans cleavage activity of an effector protein in a trans cleavage assay at 45° C. may be at least 75% of that at 37° C. In some instances, the trans cleavage activity of an effector protein in a trans cleavage assay at 45° C. may be at least 80% of that at 37° C. In some instances, the trans cleavage activity of an effector protein in a trans cleavage assay at 45° C. may be at least 85% of that at 37° C. In some instances, the trans cleavage activity of an effector protein in a trans cleavage assay at 45° C. may be at least 90% of that at 37° C. In some instances, the trans cleavage activity of an effector protein in a trans cleavage assay at 45° C. may be at least 95% of that at 37° C. In some instances, the trans cleavage activity of an effector protein in a trans cleavage assay at 45° C. may be at least 100% of that at 37° C. In some instances, the trans cleavage activity of an effector protein in a trans cleavage assay at 45° C. may be at least 1-fold of that at 37° C. In some instances, the trans cleavage activity of an effector protein in a trans cleavage assay at 45° C. may be at least 2-fold of that at 37° C. In some instances, the trans cleavage activity of an effector protein in a trans cleavage assay at 45° C. may be at least 3-fold of that at 37° C. In some instances, the trans cleavage activity of an effector protein in a trans cleavage assay at 45° C. may be at least 4-fold of that at 37° C. In some instances, the trans cleavage activity of an effector protein in a trans cleavage assay at 45° C. may be at least 5-fold of that at 37° C. In some instances, the trans cleavage activity of an effector protein in a trans cleavage assay at 45° C. may be at least 6-fold of that at 37° C. In some instances, the trans cleavage activity of an effector protein in a trans cleavage assay at 45° C. may be at least 7-fold of that at 37° C. In some instances, the trans cleavage activity of an effector protein in a trans cleavage assay at 45° C. may be at least 8-fold of that at 37° C. In some instances, the trans cleavage activity of an effector protein in a trans cleavage assay at 45° C. may be at least 9-fold of that at 37° C. In some instances, the trans cleavage activity of an effector protein in a trans cleavage assay at 45° C. may be at least 10-fold of that at 37° C. In some instances, the trans cleavage activity of an effector protein in a trans cleavage assay at 45° C. may be at least 11-fold, at least 12-fold, at least 13-fold, at least 14-fold, at least 15-fold, at least 20-fold, at least 25-fold, at least 30-fold, at least 35-fold, at least 40-fold, at least 45-fold, at least 50-fold or more of that at 37° C.

[0288] In some instances, the trans cleavage activity of an effector protein in a trans cleavage assay at 50° C. may be at least 50% of that at 37° C. In some instances, the trans cleavage activity of an effector protein in a trans cleavage assay at 50° C. may be at least 55% of that at 37° C. In some instances, the trans cleavage activity of an effector protein in a trans cleavage assay at 50° C. may be at least 60% of that at 37° C. In some instances, the trans cleavage activity of an effector protein in a trans cleavage assay at 50° C. may be at least 65% of that at 37° C. In some instances, the trans cleavage activity of an effector protein in a trans cleavage assay at 50° C. may be at least 70% of that at 37° C. In some instances, the trans cleavage activity of an effector protein in a trans cleavage assay at 50° C. may be at least 75% of that at 37° C. In some instances, the trans cleavage activity of an effector protein in a trans cleavage assay at 50° C. may be at least 80% of that at 37° C. In some instances, the trans cleavage activity of an effector protein in a trans cleavage assay at 50° C. may be at least 85% of that at 37° C. In some instances, the trans cleavage activity of an effector protein in a trans cleavage assay at 50° C. may be at least 90% of that at 37° C. In some instances, the trans cleavage activity of an effector protein in a trans cleavage assay at 50° C. may be at least 95% of that at 37° C. In some instances, the trans cleavage activity of an effector protein in a trans cleavage assay at 50° C. may be at least 100% of that at 37° C. In some instances, the trans cleavage activity of an effector protein in a trans cleavage assay at 50° C. may be at least 1-fold of that at 37° C. In some instances, the trans cleavage activity of an effector protein in a trans cleavage assay at 50° C. may be at least 2-fold of that at 37° C. In some instances, the trans cleavage activity of an effector protein in a trans cleavage assay at 50° C. may be at least 3-fold of that at 37° C. In some instances, the trans cleavage activity of an effector protein in a trans cleavage assay at 50° C. may be at least 4-fold of that at 37° C. In some instances, the trans cleavage activity of an effector protein in a trans cleavage assay at 50° C. may be at least 5-fold of that at 37° C. In some instances, the trans cleavage activity of an effector protein in a trans cleavage assay at 50° C. may be at least 6-fold of that at 37° C. In some instances, the trans cleavage activity of an effector protein in a trans cleavage assay at 50° C. may be at least 7-fold of that at 37° C. In some instances, the trans cleavage activity of an effector protein in a trans cleavage assay at 50° C. may be at least 8-fold of that at 37° C. In some instances, the trans cleavage activity of an effector protein in a trans cleavage assay at 50° C. may be at least 9-fold of that at 37° C. In some instances, the trans cleavage activity of an effector protein in a trans cleavage assay at 50° C. may be at least 10-fold of that at 37° C. In some instances, the trans cleavage activity of an effector protein in a trans cleavage assay at 50° C. may be at least 11-fold, at least 12-fold, at least 13-fold, at least 14-fold, at least 15-fold, at least 20-fold, at least 25-fold, at least 30-fold, at least 35-fold, at least 40-fold, at least 45-fold, at least 50-fold or more of that at 37° C.

[0289] In some instances, the trans cleavage activity of an effector protein in a trans cleavage assay at 55° C. may be at least 50% of that at 37° C. In some instances, the trans cleavage activity of an effector protein in a trans cleavage assay at 55° C. may be at least 55% of that at 37° C. In some instances, the trans cleavage activity of an effector protein in a trans cleavage assay at 55° C. may be at least 60% of that at 37° C. In some instances, the trans cleavage activity of an effector protein in a trans cleavage assay at 55° C. may be at least 65% of that at 37° C. In some instances, the trans cleavage activity of an effector protein in a trans cleavage assay at 55° C. may be at least 70% of that at 37° C. In some instances, the trans cleavage activity of an effector protein in a trans cleavage assay at 55° C. may be at least 75% of that at 37° C. In some instances, the trans cleavage activity of an effector protein in a trans cleavage assay at 55° C. may be at least 80% of that at 37° C. In some instances, the trans cleavage activity of an effector protein in a trans cleavage assay at 55° C. may be at least 85% of that at 37° C. In some instances, the trans cleavage activity of an effector protein in a trans cleavage assay at 55° C. may be at least 90% of that at 37° C. In some instances, the trans cleavage activity of an effector protein in a trans cleavage assay at 55° C. may be at least 95% of that at 37° C. In some instances, the trans cleavage activity of an effector protein in a trans cleavage assay at 55° C. may be at least 100% of that at 37° C. In some instances, the trans cleavage activity of an effector protein in a trans cleavage assay at 55° C. may be at least 1-fold of that at 37° C. In some instances, the trans cleavage activity of an effector protein in a trans cleavage assay at 55° C. may be at least 2-fold of that at 37° C. In some instances, the trans cleavage activity of an effector protein in a trans cleavage assay at 55° C. may be at least 3-fold of that at 37° C. In some instances, the trans cleavage activity of an effector protein in a trans cleavage assay at 55° C. may be at least 4-fold of that at 37° C. In some instances, the trans cleavage activity of an effector protein in a trans cleavage assay at 55° C. may be at least 5-fold of that at 37° C. In some instances, the trans cleavage activity of an effector protein in a trans cleavage assay at 55° C. may be at least 6-fold of that at 37° C. In some instances, the trans cleavage activity of an effector protein in a trans cleavage assay at 55° C. may be at least 7-fold of that at 37° C. In some instances, the trans cleavage activity of an effector protein in a trans cleavage assay at 55° C. may be at least 8-fold of that at 37° C. In some instances, the trans cleavage activity of an effector protein in a trans cleavage assay at 55° C. may be at least 9-fold of that at 37° C. In some instances, the trans cleavage activity of an effector protein in a trans cleavage assay at 55° C. may be at least 10-fold of that at 37° C. In some instances, the trans cleavage activity of an effector protein in a trans cleavage assay at 55° C. may be at least 11-fold, at least 12-fold, at least 13-fold, at least 14-fold, at least 15-fold, at least 20-fold, at least 25-fold, at least 30-fold, at least 35-fold, at least 40-fold, at least 45-fold, at least 50-fold or more of that at 37° C.

[0290] In some instances, the trans cleavage activity of an effector protein in a trans cleavage assay at 60° C. may be at least 50% of that at 37° C. In some instances, the trans cleavage activity of an effector protein in a trans cleavage assay at 60° C. may be at least 55% of that at 37° C. In some instances, the trans cleavage activity of an effector protein in a trans cleavage assay at 60° C. may be at least 60% of that at 37° C. In some instances, the trans cleavage activity of an effector protein in a trans cleavage assay at 60° C. may be at least 65% of that at 37° C. In some instances, the trans cleavage activity of an effector protein in a trans cleavage assay at 60° C. may be at least 70% of that at 37° C. In some instances, the trans cleavage activity of an effector protein in a trans cleavage assay at 60° C. may be at least 75% of that at 37° C. In some instances, the trans cleavage activity of an effector protein in a trans cleavage assay at 60° C. may be at least 80% of that at 37° C. In some instances, the trans cleavage activity of an effector protein in a trans cleavage assay at 60° C. may be at least 85% of that at 37° C. In some instances, the trans cleavage activity of an effector protein in a trans cleavage assay at 60° C. may be at least 90% of that at 37° C. In some instances, the trans cleavage activity of an effector protein in a trans cleavage assay at 60° C. may be at least 95% of that at 37° C. In some instances, the trans cleavage activity of an effector protein in a trans cleavage assay at 60° C. may be at least 100% of that at 37° C. In some instances, the trans cleavage activity of an effector protein in a trans cleavage assay at 60° C. may be at least 1-fold of that at 37° C. In some instances, the trans cleavage activity of an effector protein in a trans cleavage assay at 60° C. may be at least 2-fold of that at 37° C. In some instances, the trans cleavage activity of an effector protein in a trans cleavage assay at 60° C. may be at least 3-fold of that at 37° C. In some instances, the trans cleavage activity of an effector protein in a trans cleavage assay at 60° C. may be at least 4-fold of that at 37° C. In some instances, the trans cleavage activity of an effector protein in a trans cleavage assay at 60° C. may be at least 5-fold of that at 37° C. In some instances, the trans cleavage activity of an effector protein in a trans cleavage assay at 60° C. may be at least 6-fold of that at 37° C. In some instances, the trans cleavage activity of an effector protein in a trans cleavage assay at 60° C. may be at least 7-fold of that at 37° C. In some instances, the trans cleavage activity of an effector protein in a trans cleavage assay at 60° C. may be at least 8-fold of that at 37° C. In some instances, the trans cleavage activity of an effector protein in a trans cleavage assay at 60° C. may be at least 9-fold of that at 37° C. In some instances, the trans cleavage activity of an effector protein in a trans cleavage assay at 60° C. may be at least 10-fold of that at 37° C. In some instances, the trans cleavage activity of an effector protein in a trans cleavage assay at 60° C. may be at least 11-fold, at least 12-fold, at least 13-fold, at least 14-fold, at least 15-fold, at least 20-fold, at least 25-fold, at least 30-fold, at least 35-fold, at least 40-fold, at least 45-fold, at least 50-fold or more of that at 37° C.

[0291] In some instances, the trans cleavage activity of an effector protein in a trans cleavage assay at 65° C. may be at least 50% of that at 37° C. In some instances, the trans cleavage activity of an effector protein in a trans cleavage assay at 65° C. may be at least 55% of that at 37° C. In some instances, the trans cleavage activity of an effector protein in a trans cleavage assay at 65° C. may be at least 60% of that at 37° C. In some instances, the trans cleavage activity of an effector protein in a trans cleavage assay at 65° C. may be at least 65% of that at 37° C. In some instances, the trans cleavage activity of an effector protein in a trans cleavage assay at 65° C. may be at least 70% of that at 37° C. In some instances, the trans cleavage activity of an effector protein in a trans cleavage assay at 65° C. may be at least 75% of that at 37° C. In some instances, the trans cleavage activity of an effector protein in a trans cleavage assay at 65° C. may be at least 80% of that at 37° C. In some instances, the trans cleavage activity of an effector protein in a trans cleavage assay at 65° C. may be at least 85% of that at 37° C. In some instances, the trans cleavage activity of an effector protein in a trans cleavage assay at 65° C. may be at least 90% of that at 37° C. In some instances, the trans cleavage activity of an effector protein in a trans cleavage assay at 65° C. may be at least 95% of that at 37° C. In some instances, the trans cleavage activity of an effector protein in a trans cleavage assay at 65° C. may be at least 100% of that at 37° C. In some instances, the trans cleavage activity of an effector protein in a trans cleavage assay at 65° C. may be at least 1-fold of that at 37° C. In some instances, the trans cleavage activity of an effector protein in a trans cleavage assay at 65° C. may be at least 2-fold of that at 37° C. In some instances, the trans cleavage activity of an effector protein in a trans cleavage assay at 65° C. may be at least 3-fold of that at 37° C. In some instances, the trans cleavage activity of an effector protein in a trans cleavage assay at 65° C. may be at least 4-fold of that at 37° C. In some instances, the trans cleavage activity of an effector protein in a trans cleavage assay at 65° C. may be at least 5-fold of that at 37° C. In some instances, the trans cleavage activity of an effector protein in a trans cleavage assay at 65° C. may be at least 6-fold of that at 37° C. In some instances, the trans cleavage activity of an effector protein in a trans cleavage assay at 65° C. may be at least 7-fold of that at 37° C. In some instances, the trans cleavage activity of an effector protein in a trans cleavage assay at 65° C. may be at least 8-fold of that at 37° C. In some instances, the trans cleavage activity of an effector protein in a trans cleavage assay at 65° C. may be at least 9-fold of that at 37° C. In some instances, the trans cleavage activity of an effector protein in a trans cleavage assay at 65° C. may be at least 10-fold of that at 37° C. In some instances, the trans cleavage activity of an effector protein in a trans cleavage assay at 65° C. may be at least 11-fold, at least 12-fold, at least 13-fold, at least 14-fold, at least 15-fold, at least 20-fold, at least 25-fold, at least 30-fold, at least 35-fold, at least 40-fold, at least 45-fold, at least 50-fold or more of that at 37° C. In some instances, the trans cleavage activity of an effector protein in a trans cleavage assay at 70° C., 75° C. 80° C., or more may be at least 50, at least 60%, at least 65%, at least 70%, at least 75%, at least 80%, at least 85%, at least 95%, at least 100%, at least 1-fold, at least 2-fold, at least 3-fold, at least 4-fold, at least 5-fold, at least 6-fold, at least 7-fold, at least 8-fold, at least 9-fold, at least 10-fold, at least 11-fold, at least 12-fold, at least 13-fold, at least 14-fold, at least 15-fold, at least 20-fold, at least 25-fold, at least 30-fold, at least 35-fold, at least 40-fold, at least 45-fold, at least 50-fold or more of that at 37° C.

[0292] In some instances, the trans cleavage activity may be measured against a negative control in a trans cleavage assay. In some instances, the trans cleavage activity of an effector protein against a nucleic acid in a trans cleavage assay at 37° C. may be at least 50%, at least 55%, at least 60%, at least 65%, at least 70%, at least 75%, at least 80%, at least 85%, at least 90%, at least 95%, at least 100%, at least 1-fold, at least 2-fold, at least 3-fold, at least 4-fold, at least 5-fold, at least 6-fold, at least 7-fold, at least 8-fold, at least 9-fold, or at least 10-fold of that against a negative control nucleic acid. In some instances, the trans cleavage activity of an effector protein against a nucleic acid in a trans cleavage assay at 37° C. may be at least 11-fold, at least 12-fold, at least 13-fold, at least 14-fold, at least 15-fold, at least 20-fold, at least 25-fold, at least 30-fold, at least 35-fold, at least 40-fold, at least 45-fold, at least 50-fold or more of that against a negative control nucleic acid. In some instances, the trans cleavage activity of an effector protein against a nucleic acid in a trans cleavage assay at 40° C. may be at least 50%, at least 55%, at least 60%, at least 65%, at least 70%, at least 75%, at least 80%, at least 85%, at least 90%, at least 95%, at least 100%, at least 1-fold, at least 2-fold, at least 3-fold, at least 4-fold, at least 5-fold, at least 6-fold, at least 7-fold, at least 8-fold, at least 9-fold, or at least 10-fold of that against a negative control nucleic acid. In some instances, the trans cleavage activity of an effector protein against a nucleic acid in a trans cleavage assay at 40° C. may be at least 11-fold, at least 12-fold, at least 13-fold, at least 14-fold, at least 15-fold, at least 20-fold, at least 25-fold, at least 30-fold, at least 35-fold, at least 40-fold, at least 45-fold, at least 50-fold or more of that against a negative control nucleic acid. In some instances, the trans cleavage activity of an effector protein against a nucleic acid in a trans cleavage assay at 45° C. may be at least 50%, at least 55%, at least 60%, at least 65%, at least 70%, at least 75%, at least 80%, at least 85%, at least 90%, at least 95%, at least 100%, at least 1-fold, at least 2-fold, at least 3-fold, at least 4-fold, at least 5-fold, at least 6-fold, at least 7-fold, at least 8-fold, at least 9-fold, or at least 10-fold of that against a negative control nucleic acid. In some instances, the trans cleavage activity of an effector protein against a nucleic acid in a trans cleavage assay at 45° C. may be at least 11-fold, at least 12-fold, at least 13-fold, at least 14-fold, at least 15-fold, at least 20-fold, at least 25-fold, at least 30-fold, at least 35-fold, at least 40-fold, at least 45-fold, at least 50-fold or more of that against a negative control nucleic acid. In some instances, the trans cleavage activity of an effector protein against a nucleic acid in a trans cleavage assay at 50° C. may be at least 50%, at least 55%, at least 60%, at least 65%, at least 70%, at least 75%, at least 80%, at least 85%, at least 90%, at least 95%, at least 100%, at least 1-fold, at least 2-fold, at least 3-fold, at least 4-fold, at least 5-fold, at least 6-fold, at least 7-fold, at least 8-fold, at least 9-fold, or at least 10-fold of that against a negative control nucleic acid. In some instances, the trans cleavage activity of an effector protein against a nucleic acid in a trans cleavage assay at 50° C. may be at least 11-fold, at least 12-fold, at least 13-fold, at least 14-fold, at least 15-fold, at least 20-fold, at least 25-fold, at least 30-fold, at least 35-fold, at least 40-fold, at least 45-fold, at least 50-fold or more of that against a negative control nucleic acid. In some instances, the trans cleavage activity of an effector protein against a nucleic acid in a trans cleavage assay at 55° C. may be at least 50%, at least 55%, at least 60%, at least 65%, at least 70%, at least 75%, at least 80%, at least 85%, at least 90%, at least 95%, at least 100%, at least 1-fold, at least 2-fold, at least 3-fold, at least 4-fold, at least 5-fold, at least 6-fold, at least 7-fold, at least 8-fold, at least 9-fold, or at least 10-fold of that against a negative control nucleic acid. In some instances, the trans cleavage activity of an effector protein against a nucleic acid in a trans cleavage assay at 55° C. may be at least 11-fold, at least 12-fold, at least 13-fold, at least 14-fold, at least 15-fold, at least 20-fold, at least 25-fold, at least 30-fold, at least 35-fold, at least 40-fold, at least 45-fold, at least 50-fold or more of that against a negative control nucleic acid. In some instances, the trans cleavage activity of an effector protein against a nucleic acid in a trans cleavage assay at 60° C. may be at least 50%, at least 55%, at least 60%, at least 65%, at least 70%, at least 75%, at least 80%, at least 85%, at least 90%, at least 95%, at least 100%, at least 1-fold, at least 2-fold, at least 3-fold, at least 4-fold, at least 5-fold, at least 6-fold, at least 7-fold, at least 8-fold, at least 9-fold, or at least 10-fold of that against a negative control nucleic acid. In some instances, the trans cleavage activity of an effector protein against a nucleic acid in a trans cleavage assay at 60° C. may be at least 11-fold, at least 12-fold, at least 13-fold, at least 14-fold, at least 15-fold, at least 20-fold, at least 25-fold, at least 30-fold, at least 35-fold, at least 40-fold, at least 45-fold, at least 50-fold or more of that against a negative control nucleic acid. In some instances, the trans cleavage activity of an effector protein against a nucleic acid in a trans cleavage assay at 65° C. may be at least 50%, at least 55%, at least 60%, at least 65%, at least 70%, at least 75%, at least 80%, at least 85%, at least 90%, at least 95%, at least 100%, at least 1-fold, at least 2-fold, at least 3-fold, at least 4-fold, at least 5-fold, at least 6-fold, at least 7-fold, at least 8-fold, at least 9-fold, or at least 10-fold of that against a negative control nucleic acid. In some instances, the trans cleavage activity of an effector protein against a nucleic acid in a trans cleavage assay at 65° C. may be at least 11-fold, at least 12-fold, at least 13-fold, at least 14-fold, at least 15-fold, at least 20-fold, at least 25-fold, at least 30-fold, at least 35-fold, at least 40-fold, at least 45-fold, at least 50-fold or more of that against a negative control nucleic acid. In some instances, the trans cleavage activity of an effector protein against a nucleic acid in a trans cleavage assay at 70° C., 75° C., 80° C., or more may be at least 50%, at least 55%, at least 60%, at least 65%, at least 70%, at least 75%, at least 80%, at least 85%, at least 90%, at least 95%, at least 100%, at least 1-fold, at least 2-fold, at least 3-fold, at least 4-fold, at least 5-fold, at least 6-fold, at least 7-fold, at least 8-fold, at least 9-fold, or at least 10-fold of that against a negative control nucleic acid. In some instances, the trans cleavage activity of an effector protein against a nucleic acid in a trans cleavage assay at 70° C., 75° C., 80° C., or more may be at least 11-fold, at least 12-fold, at least 13-fold, at least 14-fold, at least 15-fold, at least 20-fold, at least 25-fold, at least 30-fold, at least 35-fold, at least 40-fold, at least 45-fold, at least 50-fold or more of that against a negative control nucleic acid.

[0293] The reporters described herein can be RNA reporters. The RNA reporters can comprise at least one ribonucleic acid and a detectable moiety. In some embodiments, a programmable nuclease probe or a CRISPR probe comprising a Cas enzyme can recognize and detect ssDNA and, further, can specifically trans-cleave RNA reporters. The detection of the target nucleic acid in the sample can indicate the presence of the disease (or disease-causing agent) in the sample and can provide information for taking action to reduce the transmission of the disease to individuals in the disease-affected environment or near the disease-carrying individual.

[0294] Cleavage of a reporter (e.g., a protein-nucleic acid) can produce a signal. The signal can indicate a presence of the target nucleic acid in the sample, and an absence of the signal can indicate an absence of the target nucleic acid in the sample. In some cases, cleavage of the protein-nucleic acid can produce a calorimetric signal, a potentiometric signal, an amperometric signal, an optical signal, or a piezo-electric signal. Various devices and/or sensors can be used to detect these different types of signals, which indicate whether a target nucleic acid is present in the sample. The sensors usable to detect such signals can include, for example, optical sensors (e.g., imaging devices for detecting fluorescence or optical signals with various wavelengths and frequencies), electric potential sensors, surface plasmon resonance (SPR) sensors, interferometric sensors, or any other type of sensor suitable for detecting calorimetric signals, potentiometric signals, amperometric signals, optical signals, or piezo-electric signals.

[0295] In an aspect, the present disclosure provides a method for target detection. The method can comprise sample collection. The method can further comprise sample preparation. The method can further comprise detection of one or more target nucleic acids in the collected and prepared sample.

[0296] In another aspect, the present disclosure provides a detection device for target detection. The detection device can be configured for multiplexed target detection. The detection device can be used to collect one or more samples, prepare or process the one or more samples for detection, and optionally divide the one or more samples into a plurality of droplets, aliquots, or subsamples for amplification of one or more target sequences or target nucleic acids. The target sequences may comprise, for example, a biological sequence. The biological sequence can comprise a nucleic acid sequence or an amino acid sequence. In some embodiments, the target sequences are associated with an organism of interest, a disease of interest, a disease state of interest, a phenotype of interest, a genotype of interest, or a gene of interest.

[0297] The detection device can be configured to amplify target nucleic acids contained within the plurality of droplets, aliquots, or subsamples. The detection device can be configured to amplify the target sequences or target nucleic acids contained within the plurality of droplets by individually processing each of the plurality of droplets (e.g., by using a thermocycling process or any other suitable amplification process as described in greater detail below). In some cases, the plurality of droplets can undergo separate thermocycling processes. In some cases, the thermocycling processes can occur simultaneously. In other cases, the thermocycling processes can occur at different times for each droplet.

[0298] The detection device can be further configured to remix the droplets, aliquots, or subsamples after the target nucleic acids in each of the droplets undergo amplification. The detection device can be configured to provide the remixed sample comprising the droplets, aliquots, or subsamples to a detection chamber of the device. The detection chamber can be configured to direct the remixed droplets, aliquots, or subsamples to a plurality of programmable nuclease probes. The detection chamber can be configured to direct the remixed droplets, aliquots, or subsamples along one or more fluid flow paths such that the remixed droplets, aliquots, or subsamples are positioned adjacent to and/or in contact with the one or more programmable nuclease probes. In some cases, the detection chamber can be configured to recirculate or recycle the remixed droplets, aliquots, or subsamples such that the remixed droplets, aliquots, or subsamples are repeatedly placed in contact with one or more programmable nuclease probes over a predetermined period of time.

[0299] The detection device can comprise one or more sensors. The one or more sensors of the detection device can be configured to detect one or more signals that are generated after one or more programmable nucleases of the one or more programmable nuclease probes become activated due to a binding of a guide nucleic acid of the programmable nuclease probes with a target nucleic acid present in the sample. As described elsewhere herein, the activated programmable nuclease can cleave the target nucleic acid, which can result in a trans cleavage activity. Trans cleavage activity can be a non-specific cleavage of nearby single-stranded nucleic acids by the activated programmable nuclease, such as trans cleavage of target nucleic acids with a detection moiety. Once the target nucleic acids are cleaved by the activated programmable nucleases, the detection moiety can be released or separated from the reporter, thereby generating one or more detectable signals. The one or more sensors of the detection device can be configured to register and/or process the one or more detectable signals to confirm a presence and/or an absence of a particular target (e.g., a target nucleic acid).

[0300] The one or more programmable nuclease probes of the detection device can be configured for multiplexed detection. In some cases, each programmable nuclease probe can be configured to detect a particular target. In other cases, each programmable nuclease probe can be configured to detect a plurality of targets. In some cases, a first programmable nuclease probe can be configured to detect a first target or a first set of targets, and a second programmable nuclease probe can be configured to detect a second target or a second set of targets. In other cases, a first programmable nuclease probe can be configured to detect a first set of targets, and a second programmable nuclease probe can be configured to detect a second set of targets. The programmable nuclease probes of the present disclosure can be used to detect a plurality of different target sequences or target nucleic acids. In any of the embodiments described herein, the sample provided to the detection device can comprise a plurality of target sequences or target nucleic acids. In any of the embodiments described herein, the sample provided to the detection device can comprise multiple classes of target sequences or target nucleic acids. Each class of target sequences or class of target nucleic acids can comprise a plurality of target sequences or target nucleic acids associated with a particular organism, disease state, phenotype, or genotype present within the sample. In some cases, each programmable nuclease probe can be used to detect a particular class of target sequences or a particular class of target nucleic acids associated with a particular organism, disease state, phenotype, or genotype present within the sample. In some cases, two or more programmable nuclease probes can be used to detect different classes of target sequences or different classes of target nucleic acids. In such cases, the two or more programmable nuclease probes can comprise different sets or classes of guide nucleic acids complexed to the programmable nucleases of the probes.

[0301] In any of the embodiments described herein, the detection device can comprise a single integrated system that is configured to perform sample collection, sample processing, droplet generation, droplet processing (e.g., amplification of target nucleic acids in droplets), droplet remixing, and/or circulation of the remixed droplets within a detection chamber so that at least a portion of the remixed droplets is placed in contact with one or more programmable nuclease probes coupled to the detection chamber. The detection devices of the present disclosure can be disposable devices configured to perform one or more rapid single reaction or multi-reaction tests to detect a presence and/or an absence of one or more target sequences or target nucleic acids.

[0302] The systems and methods of the present disclosure can be used to detect one or more target sequences or nucleic acids in one or more samples. The one or more samples can comprise one or more target sequences or nucleic acids for detection of an ailment, such as a disease, cancer, or genetic disorder, or genetic information, such as for phenotyping, genotyping, or determining ancestry and are compatible with the reagents and support mediums as described herein. Generally, a sample can be taken from any place where a nucleic acid can be found. Samples can be taken from an individual/human, a non-human animal, or a crop, or an environmental sample can be obtained to test for presence of a disease, virus, pathogen, cancer, genetic disorder, or any mutation or pathogen of interest. A biological sample can be blood, serum, plasma, lung fluid, exhaled breath condensate, saliva, spit, urine, stool, feces, mucus, lymph fluid, peritoneal, cerebrospinal fluid, amniotic fluid, breast milk, gastric secretions, bodily discharges, secretions from ulcers, pus, nasal secretions, sputum, pharyngeal exudates, urethral secretions/mucus, vaginal secretions/mucus, anal secretion/mucus, semen, tears, an exudate, an effusion, tissue fluid, interstitial fluid (e.g., tumor interstitial fluid), cyst fluid, tissue, or, in some instances, any combination thereof. A sample can be an aspirate of a bodily fluid from an animal (e.g., human, animals, livestock, pet, etc.) or plant. A tissue sample can be from any tissue that can be infected or affected by a pathogen (e.g., a wart, lung tissue, skin tissue, and the like). A tissue sample (e.g., from animals, plants, or humans) can be dissociated or liquified prior to application to detection system of the present disclosure. A sample can be from a plant (e.g., a crop, a hydroponically grown crop or plant, and/or house plant). Plant samples can include extracellular fluid, from tissue (e.g., root, leaves, stem, trunk etc.). A sample can be taken from the environment immediately surrounding a plant, such as hydroponic fluid/water, or soil. A sample from an environment can be from soil, air, or water. In some instances, the environmental sample is taken as a swab from a surface of interest or taken directly from the surface of interest. In some instances, the raw sample is applied to the detection system. In some instances, the sample is diluted with a buffer or a fluid or concentrated prior to application to the detection system. In some cases, the sample is contained in no more than about 200 nanoliters (nL). In some cases, the sample is contained in about 200 nL. In some cases, the sample is contained in a volume that is greater than about 200 nL and less than about 20 microliters (μL). In some cases, the sample is contained in no more than 20 μl. In some cases, the sample is contained in no more than 1, 5, 10, 15, 20, 25, 30, 35 40, 45, 50, 55, 60, 65, 70, 75, 80, 90, 100, 200, 300, 400, 500 μl, or any of value from 1 μl to 500 μl. In some cases, the sample is contained in from 1 μL to 500 μL, from 10 μL to 500 μL, from 50 μL to 500 μL, from 100 μL to 500 μL, from 200 μL to 500 μL, from 300 μL to 500 μL, from 400 μL to 500 μL, from 1 μL to 200 μL, from 10 μL to 200 μL, from 50 μL to 200 μL, from 100 μL to 200 μL, from 1 μL to 100 μL, from 10 μL to 100 μL, from 50 μL to 100 μL, from 1 μL to 50 μL, from 10 μL to 50 μL, from 1 μL to 20 μL, from 10 μL to 20 μL, or from 1 μL to 10 μL. Sometimes, the sample is contained in more than 500 μl.

[0303] In some instances, the sample is taken from a single-cell eukaryotic organism; a plant or a plant cell; an algal cell; a fungal cell; an animal or an animal cell, tissue, or organ; a cell, tissue, or organ from an invertebrate animal; a cell, tissue, fluid, or organ from a vertebrate animal such as fish, amphibian, reptile, bird, and mammal; a cell, tissue, fluid, or organ from a mammal such as a human, a non-human primate, an ungulate, a feline, a bovine, an ovine, and a caprine. In some instances, the sample is taken from nematodes, protozoans, helminths, or malarial parasites. In some cases, the sample may comprise nucleic acids from a cell lysate from a eukaryotic cell, a mammalian cell, a human cell, a prokaryotic cell, or a plant cell. In some cases, the sample may comprise nucleic acids expressed from a cell.

[0304] The sample used for disease testing can comprise at least one target sequence that can bind to a guide nucleic acid of the reagents described herein. In some cases, the target sequence is a portion of a nucleic acid. A nucleic acid can be from a genomic locus, a transcribed mRNA, or a reverse transcribed cDNA. A nucleic acid can be from 5 to 100, 5 to 90, 5 to 80, 5 to 70, 5 to 60, 5 to 50, 5 to 40, 5 to 30, 5 to 25, 5 to 20, 5 to 15, or 5 to 10 nucleotides in length. A nucleic acid can be from 10 to 90, from 20 to 80, from 30 to 70, or from 40 to 60 nucleotides in length. A nucleic acid sequence can be from 10 to 95, from 20 to 95, from 30 to 95, from 40 to 95, from 50 to 95, from 60 to 95, from 10 to 75, from 20 to 75, from 30 to 75, from 40 to 75, from 50 to 75, from 5 to 50, from 15 to 50, from 25 to 50, from 35 to 50, or from 45 to 50 nucleotides in length. A nucleic acid can be 5, 6, 7, 8, 9, 10, 11, 12, 13, 14, 15, 16, 17, 18, 19, 20, 21, 22, 23, 24, 25, 26, 27, 28, 29, 30, 31, 32, 33, 34, 35, 36, 37, 38, 39, 40, 45, 50, 60, 70, 80, 90, or 100 nucleotides in length. The target nucleic acid can be reverse complementary to a guide nucleic acid. In some cases, at least 5, 6, 7, 8, 9, 10, 11, 12, 13, 14, 15, 16, 17, 18, 19, 20, 21, 22, 23, 24, 25, 26, 27, 28, 29, 30, 31, 32, 33, 34, 35, 36, 37, 38, 39, 40, 45, 50, 60, 70, 80, 90, or 100 nucleotides of a guide nucleic acid can be reverse complementary to a target nucleic acid.

[0305] In some cases, the target sequence is a portion of a nucleic acid from a virus or a bacterium or other agents responsible for a disease in the sample. The target sequence, in some cases, is a portion of a nucleic acid from a sexually transmitted infection or a contagious disease, in the sample. The target sequence, in some cases, is a portion of a nucleic acid from an upper respiratory tract infection, a lower respiratory tract infection, or a contagious disease, in the sample. The target sequence, in some cases, is a portion of a nucleic acid from a hospital acquired infection or a contagious disease, in the sample. The target sequence, in some cases, is a portion of a nucleic acid from sepsis, in the sample. These diseases can include but are not limited to respiratory viruses (e.g., SARS-CoV-2 (i.e., a virus that causes COVID-19), SARS, MERS, influenza, Adenovirus, Coronavirus HKU1, Coronavirus NL63, Coronavirus 229E, Coronavirus OC43, Severe Acute Respiratory Syndrome Coronavirus 2 (SARS-CoV-2), Human Metapneumovirus (hMPV), Human Rhinovirus/Enterovirus, Influenza A, Influenza A/H1, Influenza A/H3, Influenza A/H1-2009, Influenza B, Influenza C, Parainfluenza Virus 1, Parainfluenza Virus 2, Parainfluenza Virus 3, Parainfluenza Virus 4, Respiratory Syncytial Virus) and respiratory bacteria (e.g., Bordetella parapertussis, Bordetella pertussis, Chlamydia pneumoniae, Mycoplasma pneumoniae). Other viruses include human immunodeficiency virus (HIV), human papillomavirus (HPV), chlamydia, gonorrhea, syphilis, trichomoniasis, sexually transmitted infection, malaria, Dengue fever, Ebola, chikungunya, and leishmaniasis. Pathogens include viruses, fungi, helminths, protozoa, malarial parasites, Plasmodium parasites, Toxoplasma parasites, and Schistosoma parasites. Helminths include roundworms, heartworms, and phytophagous nematodes, flukes, Acanthocephala, and tapeworms. Protozoan infections include infections from Giardia spp., Trichomonas spp., African trypanosomiasis, amoebic dysentery, babesiosis, balantidial dysentery, Chaga's disease, coccidiosis, malaria and toxoplasmosis. Examples of pathogens such as parasitic/protozoan pathogens include, but are not limited to: Plasmodium falciparum, P. vivax, Trypanosoma cruzi and Toxoplasma gondii. Fungal pathogens include, but are not limited to Cryptococcus neoformans, Histoplasma capsulatum, Coccidioides immitis, Blastomyces dermatitidis, Chlamydia trachomatis, Chlamydia pneumoniae, Chlamydia psittaci, and Candida albicans. Pathogenic viruses include but are not limited to: respiratory viruses (e.g., adenoviruses, parainfluenza viruses, severe acute respiratory syndrome (SARS), coronavirus, MERS), gastrointestinal viruses (e.g., noroviruses, rotaviruses, some adenoviruses, astroviruses), exanthematous viruses (e.g., the virus that causes measles, the virus that causes rubella, the virus that causes chickenpox/shingles, the virus that causes roseola, the virus that causes smallpox, the virus that causes fifth disease, chikungunya virus infection); hepatic viral diseases (e.g., hepatitis A, B, C, D, E); cutaneous viral diseases (e.g., warts (including genital, anal), herpes (including oral, genital, anal), molluscum contagiosum); hemmorhagic viral diseases (e.g., Ebola, Lassa fever, dengue fever, yellow fever, Marburg hemorrhagic fever, Crimean-Congo hemorrhagic fever); neurologic viruses (e.g., polio, viral meningitis, viral encephalitis, rabies), sexually transmitted viruses (e.g., HIV, HPV, and the like), immunodeficiency virus (e.g., HIV); influenza virus; dengue; West Nile virus; herpes virus; yellow fever virus; Hepatitis Virus C; Hepatitis Virus A; Hepatitis Virus B; papillomavirus; and the like. Pathogens include, e.g., HIV virus, Mycobacterium tuberculosis, Klebsiella pneumoniae, Acinetobacter baumannii, Bacillus anthracis, Bortadella pertussis, Burkholderia cepacia, Corynebacterium diphtheriae, Coxiella burnetii, Streptococcus agalactiae, methicillin-resistant Staphylococcus aureus, Legionella longbeachae, Legionella pneumophila, Leptospira interrogans, Moraxella catarrhalis, Streptococcus pyogenes, Escherichia coli, Neisseria gonorrhoeae, Neisseria meningitidis, Neisseria elongate, Neisseria gonorrhoeae, Parechovirus, Pneumococcus, Pneumocystis jirovecii, Cryptococcus neoformans, Histoplasma capsulatum, Haemophilus influenzae B, Treponema pallidum, Lyme disease spirochetes, Pseudomonas aeruginosa, Mycobacterium leprae, Brucella abortus, rabies virus, influenza virus, cytomegalovirus, herpes simplex virus I, herpes simplex virus II, human serum parvo-like virus, respiratory syncytial virus (RSV), M. genitalium, T. Vaginalis, varicella-zoster virus, hepatitis B virus, hepatitis C virus, measles virus, adenovirus, human T-cell leukemia viruses, Epstein-Barr virus, murine leukemia virus, mumps virus, vesicular stomatitis virus, Sindbis virus, lymphocytic choriomeningitis virus, wart virus, blue tongue virus, Sendai virus, feline leukemia virus, Reovirus, polio virus, simian virus 40, mouse mammary tumor virus, dengue virus, rubella virus, West Nile virus, Plasmodium falciparum, Plasmodium vivax, Toxoplasma gondii, Trypanosoma rangeli, Trypanosoma cruzi, Trypanosoma rhodesiense, Trypanosoma brucei, Schistosoma mansoni, Schistosoma japonicum, Babesia bovis, Eimeria tenella, Onchocerca volvulus, Leishmania tropica, Mycobacterium tuberculosis, Trichinella spiralis, Theileria parva, Taenia hydatigena, Taenia ovis, Taenia saginata, Echinococcus granulosus, Mesocestoides corti, Mycoplasma arthritidis, M. hyorhinis, M. orale, M. arginini, Acholeplasma laidlawii, M. salivarium, M. pneumoniae, Enterobacter cloacae, Kiebsiella aerogenes, Proteus vulgaris, Serratia macesens, Enterococcus faecalis, Enterococcus faecium, Streptococcus intermdius, Streptococcus pneumoniae, and Streptococcus pyogenes. Often the target nucleic acid may comprise a sequence from a virus or a bacterium or other agents responsible for a disease that can be found in the sample. In some cases, the target nucleic acid is a portion of a nucleic acid from a genomic locus, a transcribed mRNA, or a reverse transcribed cDNA from a gene locus in at least one of: human immunodeficiency virus (HIV), human papillomavirus (HPV), chlamydia, gonorrhea, syphilis, trichomoniasis, sexually transmitted infection, malaria, Dengue fever, Ebola, chikungunya, and leishmaniasis. Pathogens include viruses, fungi, helminths, protozoa, malarial parasites, Plasmodium parasites, Toxoplasma parasites, and Schistosoma parasites. Helminths include roundworms, heartworms, and phytophagous nematodes, flukes, Acanthocephala, and tapeworms. Protozoan infections include infections from Giardia spp., Trichomonas spp., African trypanosomiasis, amoebic dysentery, babesiosis, balantidial dysentery, Chaga's disease, coccidiosis, malaria and toxoplasmosis. Examples of pathogens such as parasitic/protozoan pathogens include, but are not limited to: Plasmodium falciparum, P. vivax, Trypanosoma cruzi and Toxoplasma gondii. Fungal pathogens include, but are not limited to Cryptococcus neoformans, Histoplasma capsulatum, Coccidioides immitis, Blastomyces dermatitidis, Chlamydia trachomatis, and Candida albicans. Pathogenic viruses include but are not limited to immunodeficiency virus (e.g., HIV); influenza virus; dengue; West Nile virus; herpes virus; yellow fever virus; Hepatitis Virus C; Hepatitis Virus A; Hepatitis Virus B; papillomavirus; and the like. Pathogens include, e.g., HIV virus, Mycobacterium tuberculosis, Streptococcus agalactiae, methicillin-resistant Staphylococcus aureus, Staphylococcus epidermidis, Legionella pneumophila, Streptococcus pyogenes, Streptococcus salivarius, Escherichia coli, Neisseria gonorrhoeae, Neisseria meningitidis, Pneumococcus, Cryptococcus neoformans, Histoplasma capsulatum, Hemophilus influenzae B, Treponema pallidum, Lyme disease spirochetes, Pseudomonas aeruginosa, Mycobacterium leprae, Brucella abortus, rabies virus, influenza virus, cytomegalovirus, herpes simplex virus I, herpes simplex virus II, human serum parvo-like virus, respiratory syncytial virus (RSV), M. genitalium, T. vaginalis, varicella-zoster virus, hepatitis B virus, hepatitis C virus, measles virus, adenovirus, human T-cell leukemia viruses, Epstein-Barr virus, murine leukemia virus, mumps virus, vesicular stomatitis virus, Sindbis virus, lymphocytic choriomeningitis virus, wart virus, blue tongue virus, Sendai virus, feline leukemia virus, Reovirus, polio virus, simian virus 40, mouse mammary tumor virus, dengue virus, rubella virus, West Nile virus, Plasmodium falciparum, Plasmodium vivax, Toxoplasma gondii, Trypanosoma rangeli, Trypanosoma cruzi, Trypanosoma rhodesiense, Trypanosoma brucei, Schistosoma mansoni, Schistosoma japonicum, Babesia bovis, Eimeria tenella, Onchocerca volvulus, Leishmania tropica, Mycobacterium tuberculosis, Trichinella spiralis, Theileria parva, Taenia hydatigena, Taenia ovis, Taenia saginata, Echinococcus granulosus, Mesocestoides corti, Mycoplasma arthritidis, M. hyorhinis, M. orale, M. arginini, Acholeplasma laidlawii, M. salivarium and M. pneumoniae. In some cases, the target sequence is a portion of a nucleic acid from a genomic locus, a transcribed mRNA, or a reverse transcribed cDNA from a gene locus of bacterium or other agents responsible for a disease in the sample comprising a mutation that confers resistance to a treatment, such as a single nucleotide mutation that confers resistance to antibiotic treatment.

[0306] In some embodiments, the Coronavirus HKU1 sequence is a target of an assay. In some embodiments, the Coronavirus NL63 sequence is a target of an assay. In some embodiments, the Coronavirus 229E sequence is a target of an assay. In some embodiments, the Coronavirus OC43 sequence is a target of an assay. In some embodiments, the SARS-CoV-1 sequence is a target of an assay. In some embodiments, the MERS sequence is a target of an assay. In some embodiments, the SARS-CoV-2 sequence is a target of an assay. In some embodiments, the Respiratory Syncytial Virus A sequence is a target of an assay. In some embodiments, the Respiratory Syncytial Virus B sequence is a target of an assay. In some embodiments, the Influenza A sequence is a target of an assay. In some embodiments, the Influenza B sequence is a target of an assay. In some embodiments, the Human Metapneumovirus sequence is a target of an assay. In some embodiments, the Human Rhinovirus sequence is a target of an assay. In some embodiments, the Human Enterovirus sequence is a target of an assay. In some embodiments, the Parainfluenza Virus 1 sequence is a target of an assay. In some embodiments, the Parainfluenza Virus 2 sequence is a target of an assay. In some embodiments, the Parainfluenza Virus 3 sequence is a target of an assay. In some embodiments, the Parainfluenza Virus 4 sequence is a target of an assay. In some embodiments, the Alphacoronavirus genus sequence is a target of an assay. In some embodiments, the Betacoronavirus genus sequence is a target of an assay. In some embodiments, the Sarbecovirus subgenus sequence is a target of an assay. In some embodiments, the SARS-related virus species sequence is a target of an assay. In some embodiments, the Gammacoronavirus Genus sequence is a target of an assay. In some embodiments, the Deltacoronavirus Genus sequence is a target of an assay. In some embodiments, the Influenza B-Victoria V1 sequence is a target of an assay. In some embodiments, the Influenza B-Yamagata Y1 sequence is a target of an assay. In some embodiments, the Influenza A H1 sequence is a target of an assay. In some embodiments, the Influenza A H2 sequence is a target of an assay. In some embodiments, the Influenza A H3 sequence is a target of an assay. In some embodiments, the Influenza A H4 sequence is a target of an assay. In some embodiments, the Influenza A H5 sequence is a target of an assay. In some embodiments, the Influenza A H6 sequence is a target of an assay. In some embodiments, the Influenza A H7 sequence is a target of an assay. In some embodiments, the Influenza A H8 sequence is a target of an assay. In some embodiments, the Influenza A H9 sequence is a target of an assay. In some embodiments, the Influenza A H10 sequence is a target of an assay. In some embodiments, the Influenza A H11 sequence is a target of an assay. In some embodiments, the Influenza A H12 sequence is a target of an assay. In some embodiments, the Influenza A H13 sequence is a target of an assay. In some embodiments, the Influenza A H14 sequence is a target of an assay. In some embodiments, the Influenza A H15 sequence is a target of an assay. In some embodiments, the Influenza A H16 sequence is a target of an assay. In some embodiments, the Influenza A N1 sequence is a target of an assay. In some embodiments, the Influenza A N2 sequence is a target of an assay. In some embodiments, the Influenza A N3 sequence is a target of an assay. In some embodiments, the Influenza A N4 sequence is a target of an assay. In some embodiments, the Influenza A N5 sequence is a target of an assay. In some embodiments, the Influenza A N6 sequence is a target of an assay. In some embodiments, the Influenza A N7 sequence is a target of an assay. In some embodiments, the Influenza A N8 sequence is a target of an assay. In some embodiments, the Influenza A N9 sequence is a target of an assay. In some embodiments, the Influenza A N10 sequence is a target of an assay. In some embodiments, the Influenza A N11 sequence is a target of an assay. In some embodiments, the Influenza A/H1-2009 sequence is a target of an assay. In some embodiments, the Human endogenous control 18S rRNA sequence is a target of an assay. In some embodiments, the Human endogenous control GAPDH sequence is a target of an assay. In some embodiments, the Human endogenous control HPRT1 sequence is a target of an assay. In some embodiments, the Human endogenous control GUSB sequence is a target of an assay. In some embodiments, the Human endogenous control RNASe P sequence is a target of an assay. In some embodiments, the Influenza A oseltamivir resistance sequence is a target of an assay. In some embodiments, the Human Bocavirus sequence is a target of an assay. In some embodiments, the SARS-CoV-2 85Δ sequence is a target of an assay. In some embodiments, the SARS-CoV-2 T1001I sequence is a target of an assay. In some embodiments, the SARS-CoV-2 3675-36774 sequence is a target of an assay. In some embodiments, the SARS-CoV-2 P4715L sequence is a target of an assay. In some embodiments, the SARS-CoV-2 S5360L sequence is a target of an assay. In some embodiments, the SARS-CoV-2 69-70Δ sequence is a target of an assay. In some embodiments, the SARS-CoV-2 Tyr144fs sequence is a target of an assay. In some embodiments, the SARS-CoV-2 242-244Δ sequence is a target of an assay. In some embodiments, the SARS-CoV-2 Y453F sequence is a target of an assay. In some embodiments, the SARS-CoV-2 S477N sequence is a target of an assay. In some embodiments, the SARS-CoV-2 E848K sequence is a target of an assay. In some embodiments, the SARS-CoV-2 N501Y sequence is a target of an assay. In some embodiments, the SARS-CoV-2 D614G sequence is a target of an assay. In some embodiments, the SARS-CoV-2 P681R sequence is a target of an assay. In some embodiments, the SARS-CoV-2 P681H sequence is a target of an assay. In some embodiments, the SARS-CoV-2 L21F sequence is a target of an assay. In some embodiments, the SARS-CoV-2 Q27Stop sequence is a target of an assay. In some embodiments, the SARS-CoV-2 M1fs sequence is a target of an assay. In some embodiments, the SARS-CoV-2 R203fs sequence is a target of an assay. In some embodiments, the Human adenovirus-pan assay sequence is a target of an assay. In some embodiments, the Bordetella parapertussis sequence is a target of an assay. In some embodiments, the Bordetella pertussis sequence is a target of an assay. In some embodiments, the Chlamydophila pneumoniae sequence is a target of an assay. In some embodiments, the Mycoplasma pneumoniae sequence is a target of an assay. In some embodiments, the Legionella pneumophila sequence is a target of an assay. In some embodiments, the Bordetella bronchoseptica sequence is a target of an assay. In some embodiments, the Bordetella holmesii sequence is a target of an assay. In some embodiments, the Human adenovirus Type A sequence is a target of an assay. In some embodiments, the Human adenovirus Type B sequence is a target of an assay. In some embodiments, the Human adenovirus Type C sequence is a target of an assay. In some embodiments, the Human adenovirus Type D sequence is a target of an assay. In some embodiments, the Human adenovirus Type E sequence is a target of an assay. In some embodiments, the Human adenovirus Type F sequence is a target of an assay. In some embodiments, the Human adenovirus Type G sequence is a target of an assay. In some embodiments, the MERS-CoV sequence is a target of an assay. In some embodiments, the human metapneumovirus sequence is a target of an assay. In some embodiments, the human parainfluenza 1 sequence is a target of an assay. In some embodiments, the human parainfluenza 2 sequence is a target of an assay. In some embodiments, the human parainfluenza 4 sequence is a target of an assay. In some embodiments, the hCoV-OC43 sequence is a target of an assay. In some embodiments, the human parainfluenza 3 sequence is a target of an assay. In some embodiments, the RSV-A sequence is a target of an assay. In some embodiments, the RSV-B sequence is a target of an assay. In some embodiments, the hCoV-229E sequence is a target of an assay. In some embodiments, the hCoV-HKU1 sequence is a target of an assay. In some embodiments, the hCoV-NL63 sequence is a target of an assay. In some embodiments, the Gammacoronavirus sequence is a target of an assay. In some embodiments, the Deltacoronavirus sequence is a target of an assay. In some embodiments, the Alphacoronavirus sequence is a target of an assay. In some embodiments, the Rhinovirus C sequence is a target of an assay. In some embodiments, the Betacoronavirus sequence is a target of an assay. In some embodiments, the Influenza A sequence is a target of an assay. In some embodiments, the Influenza B sequence is a target of an assay. In some embodiments, the SARS-CoV-2 sequence is a target of an assay. In some embodiments, the SARS-CoV-1 sequence is a target of an assay. In some embodiments, the Sarbecovirus subgenus sequence is a target of an assay. In some embodiments, the SARS-related viruses sequence is a target of an assay. In some embodiments, the MS2 sequence is a target of an assay.

[0307] In some embodiments, the assay is directed to one or more target sequences. In some embodiments, a target sequence is a portion of an antimicrobial resistance (AMR) gene, such as CTX-M-1, CTX-M-2, CTX-M-25, CTX-M-8, CTX-M-9, or IMP. In some embodiments, a target sequence is a Mycobacterium tuberculosis sequence, such as a portion of IS1081 or IS6110. In some embodiments, a target sequence is an orthopox virus sequence. In some embodiments, a target sequence is a pseudorabies virus sequence. In some embodiments, a target sequence is a Staphylococcus aureus sequence, such as a portion of gyrA or gyrB, or a portion of a S. aureus thermonuclease. In some embodiments, a target sequence is a Stenotrophomonas maltophilia sequence, such as a sequence of S. maltophilia alpha, S. maltophilia beta, or S. maltophilia gamma. In some embodiments, a target sequence is a Bordetalla sp. sequence, such as a sequence of Bordetella bronchoseptica, Bordetella holmesii, Bordetella parapertussis, or Bordetella pertussis. In some embodiments, a target sequence is a Chlamydophila pneumoniae sequence. In some embodiments, a target sequence is a Human adenovirus sequence, such as a sequence of human adenovirus Type A, Type B, Type C, Type D, Type E, Type F, or Type G. In some embodiments, a target sequence is a human bocavirus sequence. In some embodiments, a target sequence is a Legionella pneumophila sequence. In some embodiments, a target sequence is a Mycoplasma pneumoniae sequence. In some embodiments, a target sequence is an Acinetobacter spp. (e.g., A. pitii, A. baumannii, or A. nosocomialis) sequence, such as a portion of gyrB or a 16S-23S ribosomal RNA intergenic spacer sequence. In some embodiments, a target sequence is a Proteus spp. (e.g. P. mirabilis, P. vulgaris, P. penneri, or P. hauseri) sequence, such as a portion of rpoD or 16S. In some embodiments, a target sequence is an Enterobacter spp. (e.g. E. nimipressuralis, E. cloacae, E. asburiae, E. hormaechei, E. kobei, E. ludwigii, or E. mori) sequence, such as a portion of dnaJ, purG, or 16S. In some embodiments, a target sequence is a Bacillus anthracis sequence, such as a portion of pagA or capB. In some embodiments, a target sequence is a Brucella spp. sequence, such as a portion of 23S, bcsp31, or omp2a. In some embodiments, a target sequence is a Coxiella burnetiid sequence, such as a portion of com1 or IS110. In some embodiments, a target sequence is a Francisella tularensis sequence, such as a portion of 16S. In some embodiments, a target sequence is a Rickettsia spp. sequence, such as a portion of 16S, 23S, or 782-17K genus common antigen. In some embodiments, a target sequence is a Yersinia pestis sequence, such as a portion of pMT1, pCD1, or pPCP1. In some embodiments, a target sequence is a A. calcoaceticus sequence, such as a portion of gyrB. In some embodiments, a target sequence is a Francisella tularensis sequence, such as a portion of tul4 or fopA. In some embodiments, a target sequence is a Nocardia spp. sequence, such as a portion of 16S, hsp65, gyrB, secA1, or sodA. In some embodiments, a target sequence is a Cryptococcus spp. sequence, such as a portion of 18S, URA5, ITS, 28S, or CTX1. In some embodiments, a target sequence is an Actinomyces spp. sequence, such as a portion of 16S. In some embodiments, a target sequence is a Streptococcus spp. sequence, such as a portion of 16S, tuf, sodA, or rpoB. In some embodiments, a target sequence is an rRNA sequence, such as a portion of 28S rRNA or 18S rRNA. In some embodiments, a target sequence is a coronavirus sequence, such as a sequence of an alphacoronavirus, betacoronavirus, deltacoronavirus, or gammacoronavirus. In some embodiments, a target sequence is a human coronavirus (hCoV) sequence, such as a sequence of hCoV-229E, hCoV-HKU1, hCoV-NL63, hCoV-OC43. In some embodiments, a target sequence is a MERS-CoV sequence. In some embodiments, the sequence is a mammarenavirus sequence, such as a sequence of a Argentinian mammarenavirus (Junin arenavirus), Lassa mammarenavirus, Lujo mammarenavirus (e.g., an L segment or S segment thereof), or Machupo mammarenavirus. In some embodiments, a target sequence is a human metapneumovirus sequence. In some embodiments, a target sequence is a human parainfluenza sequence, such as a sequence of human parainfluenza 1, human parainfluenza 2, human parainfluenza 3, or human parainfluenza 4. In some embodiments, a target sequence is an influenza A virus sequence, such as a sequence of influenza A H1, H2, H3, H4, H5, H6, H7, H8, H9, H10, H11, H12, H13, H14, H15, H16, N1, N2, N3, N4, N5, N6, N7, N8, or N9. In some embodiments, a target sequence is an influenza B sequence, such as a sequence of influenza B-Victoria V1 or influenza B-Yamagata Y1. In some embodiments, a target sequence is a bacteriophage MS2 sequence. In some embodiments, a target sequence is a rhinovirus C sequence. In some embodiments, a target sequence is a respiratory syncytial virus (RSV) sequence, such as a sequence of RSV-A or RSV-B. In some embodiments, a target sequence is a Sarbecovirus sequence. In some embodiments, a target sequence is a severe acute respiratory syndrome coronavirus (SARS-CoV) sequence, such as a sequence of SARS-CoV-1 or SARS-CoV-2. In some embodiments, a target sequence is a portion of a SARS-CoV-2 S gene, such as a sequence comprising 144/145 wild-type (WT), deletion (del) 144/145 (alpha variant), 156/157 WT, del 156/157 (delta variant), 241/243 WT, del241/243 (beta variant), 69/70 WT, del69/70 (alpha variant), A570 WT, A570D (alpha variant), A701 WT, A701V (beta variant), D1118 WT, D1118H (alpha variant), D215 WT, D215G (beta variant), D614 WT, D614G (beta variant), D80 WT, D80A (beta variant), E484 WT, E484K (gamma variant), P681 WT, P681H (alpha variant), P681R (delta variant), S982 WT, S982A (alpha variant), T19 WT, T19R (delta variant), T716 WT, T716F (gamma variant). In some embodiments, a target sequence is a SARS-related virus sequence. In some embodiments, a target sequence is a portion of a gene selected from 16S, 18S, 23S, 28S, ACTB, ATP5ME, ATP5MF, ATP5MG, ATP5PB, BCSP31, CAPB, CHMP2A, Clorf43, COM1, CTX1, DNAJ, EMC7, FOPA, GPI, GAPDH, GUSB, GYRB, HRPT1, HSP65, NDUFB3, NDUFB4, NDUFB8, OMP2A, PAGA, PRDX1, PSMB2, PSMB4, PURG, RAB7A, REEP5, RNaseP, RPL13, RPL19, RPL27A, RPL30, RPL31, RPL32, RPL37A, RPOB, RPOD, RPS10, RPS27, RPS29, RPS6, SECA1, SNRPD3, SODA, TUF, TUL4, URA5, VCP, VPS29, and YWHAG.

[0308] In some embodiments, the one or more targets may be at a concentration of 1 copy/reaction, at least about 2 copies/reaction, at least about 3 copies/reaction, at least about 4 copies/reaction, at least about 5 copies/reaction, at least about 6 copies/reaction, at least about 7 copies/reaction, at least about 8 copies/reaction, at least about 9 copies/reaction, at least about 10 copies/reaction, at least about 20 copies/reaction, at least about 30 copies/reaction, at least about 40 copies/reaction, at least about 50 copies/reaction, at least about 60 copies/reaction, at least about 70 copies/reaction, at least about 80 copies/reaction, at least about 90 copies/reaction, at least about 100 copies/reaction, at least about 200 copies/reaction, at least about 300 copies/reaction, at least about 400 copies/reaction, at least about 500 copies/reaction, at least about 600 copies/reaction, at least about 700 copies/reaction, at least about 800 copies/reaction, at least about 900 copies/reaction, at least about 1000 copies/reaction, at least about 2000 copies/reaction, at least about 3000 copies/reaction, at least about 4000 copies/reaction, at least about 5000 copies/reaction, at least about 6000 copies/reaction, at least about 7000 copies/reaction, at least about 8000 copies/reaction, at least about 9000 copies/reaction, at least about 10000 copies/reaction, at least about 20000 copies/reaction, at least about 30000 copies/reaction, at least about 40000 copies/reaction, at least about 50000 copies/reaction, at least about 60000 copies/reaction, at least about 70000 copies/reaction, at least about 80000 copies/reaction, at least about 90000 copies/reaction, or at least about 100000 copies/reaction.

[0309] The sample used for cancer testing or cancer risk testing can comprise at least one target sequence or target nucleic acid segment that can bind to a guide nucleic acid of the reagents described herein. The target nucleic acid segment, in some cases, is a portion of a nucleic acid from a gene with a mutation associated with cancer, from a gene whose overexpression is associated with cancer, a tumor suppressor gene, an oncogene, a checkpoint inhibitor gene, a gene associated with cellular growth, a gene associated with cellular metabolism, or a gene associated with cell cycle. Sometimes, the target nucleic acid encodes for a cancer biomarker, such as a prostate cancer biomarker or non-small cell lung cancer. In some cases, the assay can be used to detect “hotspots” in target nucleic acids that can be predictive of cancer, such as lung cancer, cervical cancer, in some cases, the cancer can be a cancer that is caused by a virus. Some non-limiting examples of viruses that cause cancers in humans include Epstein-Barr virus (e.g., Burkitt's lymphoma, Hodgkin's Disease, and nasopharyngeal carcinoma); papillomavirus (e.g., cervical carcinoma, anal carcinoma, oropharyngeal carcinoma, penile carcinoma); hepatitis B and C viruses (e.g., hepatocellular carcinoma); human adult T-cell leukemia virus type 1 (HTLV-1) (e.g., T-cell leukemia); and Merkel cell polyomavirus (e.g., Merkel cell carcinoma). One skilled in the art will recognize that viruses can cause or contribute to other types of cancers. In some cases, the target nucleic acid is a portion of a nucleic acid that is associated with a blood fever. In some cases, the target nucleic acid segment is a portion of a nucleic acid from a genomic locus, a transcribed mRNA, or a reverse transcribed cDNA from a locus of at least one of: ALK, APC, ATM, AXIN2, BAP1, BARD1, BLM, BMPR1A, BRCA1, BRCA2, BRIP1, CASR, CDC73, CDH1, CDK4, CDKN1B, CDKN1 C, CDKN2A, CEBPA, CHEK2, CTNNA1, DICER1, DIS3L2, EGFR, EPCAM, FH, FLCN, GATA2, GPC3, GREM1, HOXB13, HRAS, KIT, MAX, MEN1, MET, MITF, MLH1, MSH2, MSH3, MSH6, MUTYH, NBN, NF1, NF2, NTHL1, PALB2, PDGFRA, PHOX2B, PMS2, POLD1, POLE, POT1, PRKAR1A, PTCH1, PTEN, RAD50, RAD51 C, RAD51D, RB1, RECQL4, RET, RUNX1, SDHA, SDHAF2, SDHB, SDHC, SDHD, SMAD4, SMARCA4, SMARCB1, SMARCE1, STK11, SUFU, TERC, TERT, TMEM127, TP53, TSC1, TSC2, VHL, WRN, and WT1.

[0310] The sample used for genetic disorder testing can comprise at least one target sequence or target nucleic acid segment that can bind to a guide nucleic acid of the reagents described herein. In some embodiments, the genetic disorder is hemophilia, sickle cell anemia, β-thalassemia, Duchene muscular dystrophy, severe combined immunodeficiency, or cystic fibrosis. The target nucleic acid segment, in some cases, is a portion of a nucleic acid from a gene with a mutation associated with a genetic disorder, from a gene whose overexpression is associated with a genetic disorder, from a gene associated with abnormal cellular growth resulting in a genetic disorder, or from a gene associated with abnormal cellular metabolism resulting in a genetic disorder. In some cases, the target nucleic acid segment is a portion of a nucleic acid from a genomic locus, a transcribed mRNA, or a reverse transcribed cDNA from a locus of at least one of: CFTR, FMR1, SMN1, ABCB11, ABCC8, ABCD1, ACAD9, ACADM, ACADVL, ACAT1, ACOX1, ACSF3, ADA, ADAMTS2, ADGRG1, AGA, AGL, AGPS, AGXT, AIRE, ALDH3A2, ALDOB, ALG6, ALMS1, ALPL, AMT, AQP2, ARG1, ARSA, ARSB, ASL, ASNS, ASPA, ASS1, ATM, ATP6V1B1, ATP7A, ATP7B, ATRX, BBS1, BBS10, BBS12, BBS2, BCKDHA, BCKDHB, BCS1L, BLM, BSND, CAPN3, CBS, CDH23, CEP290, CERKL, CHM, CHRNE, CIITA, CLN3, CLN5, CLN6, CLN8, CLRN1, CNGB3, COL27A1, COL4A3, COL4A4, COL4A5, COL7A1, CPS1, CPT1A, CPT2, CRB1, CTNS, CTSK, CYBA, CYBB, CYP11B1, CYP11B2, CYP17A1, CYP19A1, CYP27A1, DBT, DCLRE1 C, DHCR7, DHDDS, DLD, DMD, DNAH5, DNAI1, DNAI2, DYSF, EDA, EIF2B5, EMD, ERCC6, ERCC8, ESCO2, ETFA, ETFDH, ETHE1, EVC, EVC2, EYS, F9, FAH, FAM161A, FANCA, FANCC, FANCG, FH, FKRP, FKTN, G6PC, GAA, GALC, GALK1, GALT, GAMT, GBA, GBE1, GCDH, GFM1, GJB1, GJB2, GLA, GLB1, GLDC, GLE1, GNE, GNPTAB, GNPTG, GNS, GRHPR, HADHA, HAX1, HBA1, HBA2, HBB, HEXA, HEXB, HGSNAT, HLCS, HMGCL, HOGA1, HPS1, HPS3, HSD17B4, HSD3B2, HYAL1, HYLS1, IDS, IDUA, IKBKAP, IL2RG, IVD, KCNJ11, LAMA2, LAMA3, LAMB3, LAMC2, LCA5, LDLR, LDLRAP1, LHX3, LIFR, LIPA, LOXHD1, LPL, LRPPRC, MAN2B1, MCOLN1, MED17, MESP2, MFSD8, MKS1, MLC1, MMAA, MMAB, MMACHC, MMADHC, MPI, MPL, MPV17, MTHFR, MTM1, MTRR, MTTP, MUT, MYO7A, NAGLU, NAGS, NBN, NDRG1, NDUFAF5, NDUFS6, NEB, NPC1, NPC2, NPHS1, NPHS2, NR2E3, NTRK1, OAT, OPA3, OTC, PAH, PC, PCCA, PCCB, PCDH15, PDHA1, PDHB, PEX1, PEX10, PEX12, PEX2, PEX6, PEX7, PFKM, PHGDH, PKHD1, PMM2, POMGNTI, PPT1, PROP1, PRPS1, PSAP, PTS, PUS1, PYGM, RAB23, RAG2, RAPSN, RARS2, RDH12, RMRP, RPE65, RPGRIPIL, RS1, RTEL1, SACS, SAMHD1, SEPSECS, SGCA, SGCB, SGCG, SGSH, SLC12A3, SLC12A6, SLC17A5, SLC22A5, SLC25A13, SLC25A15, SLC26A2, SLC26A4, SLC35A3, SLC37A4, SLC39A4, SLC4A11, SLC6A8, SLC7A7, SMARCAL1, SMPD1, STAR, SUMF1, TAT, TCIRG1, TECPR2, TFR2, TGM1, TH, TMEM216, TPP1, TRMU, TSFM, TTPA, TYMP, USH1 C, USH2A, VPS13A, VPS13B, VPS45, VRK1, VSX2, WNT10A, XPA, XPC, and ZFYVE26.

[0311] The sample used for phenotyping testing can comprise at least one target nucleic acid segment that can bind to a guide nucleic acid of the reagents described herein. The target nucleic acid segment, in some cases, is a portion of a nucleic acid from a gene associated with a phenotypic trait.

[0312] The sample used for genotyping testing can comprise at least one target nucleic acid segment that can bind to a guide nucleic acid of the reagents described herein. The target nucleic acid segment, in some cases, is a portion of a nucleic acid from a gene associated with a genotype.

[0313] The sample used for ancestral testing can comprise at least one target nucleic acid segment that can bind to a guide nucleic acid of the reagents described herein. The target nucleic acid segment, in some cases, is a portion of a nucleic acid from a gene associated with a geographic region of origin or ethnic group.

[0314] The sample can be used for identifying a disease status. For example, a sample is any sample described herein, and is obtained from a subject for use in identifying a disease status of a subject. The disease can be a cancer or genetic disorder. Sometimes, a method may comprise obtaining a serum sample from a subject; and identifying a disease status of the subject. Often, the disease status is prostate disease status. In any of the embodiments described herein, the device can be configured for asymptomatic, pre-symptomatic, and/or symptomatic diagnostic applications, irrespective of immunity. In any of the embodiments described herein, the device can be configured to perform one or more serological assays on a sample (e.g., a sample comprising blood).

[0315] In some embodiments, the sample can be used to identify a mutation in a target nucleic acid of a plant or of a bacteria, virus, or microbe associated with a plant or soil. The devices and methods of the present disclosure can be used to identify a mutation of a target nucleic acid that affects the expression of a gene. A mutation that affects the expression of gene can be a mutation of a target nucleic acid within the gene, a mutation of a target nucleic acid comprising RNA associated with the expression of a gene, or a target nucleic acid comprising a mutation of a nucleic acid associated with regulation of expression of a gene, such as an RNA or a promoter, enhancer, or repressor of the gene. Often, the mutation is a single nucleotide mutation

[0316] In some instances, the target nucleic acid is a single stranded nucleic acid. Alternatively, or in combination, the target nucleic acid is a double stranded nucleic acid and is prepared into single stranded nucleic acids before or upon contacting the reagents. The target nucleic acid can be a RNA, DNA, synthetic nucleic acids, or nucleic acids found in biological or environmental samples. The target nucleic acids include but are not limited to mRNA, rRNA, tRNA, non-coding RNA, long non-coding RNA, and microRNA (miRNA). In some cases, the target nucleic acid is mRNA. In some cases, the target nucleic acid is from a virus, a parasite, or a bacterium described herein. In some cases, the target nucleic acid is transcribed from a gene as described herein.

[0317] A number of target nucleic acids are consistent with the systems and methods disclosed herein. Some methods described herein can detect a target nucleic acid present in the sample in various concentrations or amounts as a target nucleic acid population. In some cases, the sample has at least 2 target nucleic acids. In some cases, the sample has at least 3, 5, 10, 20, 30, 40, 50, 100, 200, 300, 400, 500, 600, 700, 800, 900, 1000, 2000, 3000, 4000, 5000, 6000, 7000, 8000, 9000, or 10000 target nucleic acids. In some cases, the sample has from 1 to 10,000, from 100 to 8000, from 400 to 6000, from 500 to 5000, from 1000 to 4000, or from 2000 to 3000 target nucleic acids. In some cases, the sample has from 100 to 9500, from 100 to 9000, from 100 to 8500, from 100 to 8000, from 100 to 7500, from 100 to 7000, from 100 to 6500, from 100 to 6000, from 100 to 5500, from 100 to 5000, from 250 to 9500, from 250 to 9000, from 250 to 8500, from 250 to 8000, from 250 to 7500, from 250 to 7000, from 250 to 6500, from 250 to 6000, from 250 to 5500, from 250 to 5000, from 2500 to 9500, from 2500 to 9000, from 2500 to 8500, from 2500 to 8000, from 2500 to 7500, from 2500 to 7000, from 2500 to 6500, from 2500 to 6000, from 2500 to 5500, or from 2500 to 5000 target nucleic acids. In some cases, the method detects target nucleic acid present at least at one copy per 10¹ non-target nucleic acids, 10² non-target nucleic acids, 10³ non-target nucleic acids, 10⁴ non-target nucleic acids, 10⁵ non-target nucleic acids, 10⁶ non-target nucleic acids, 10⁷ non-target nucleic acids, 10⁸ non-target nucleic acids, 10⁹ non-target nucleic acids, or 10¹⁰ non-target nucleic acids.

[0318] A number of target nucleic acid populations are consistent with the systems and methods disclosed herein. Some methods described herein can be implemented to detect two or more target nucleic acid populations present in the sample in various concentrations or amounts. In some cases, the sample has at least 2 target nucleic acid populations. In some cases, the sample has at least 3, 4, 5, 6, 7, 8, 9, 10, 20, 30, 40, or 50 target nucleic acid populations. In some cases, the sample has from 3 to 50, from 5 to 40, or from 10 to 25 target nucleic acid populations. In some cases, the sample has from 2 to 50, from 5 to 50, from 10 to 50, from 2 to 25, from 3 to 25, from 4 to 25, from 5 to 25, from 10 to 25, from 2 to 20, from 3 to 20, from 4 to 20, from 5 to 20, from 10 to 20, from 2 to 10, from 3 to 10, from 4 to 10, from 5 to 10, from 6 to 10, from 7 to 10, from 8 to 10, or from 9 to 10 target nucleic acid populations. In some cases, the methods of the present disclosure can be implemented to detect target nucleic acid populations that are present at least at one copy per 10¹ non-target nucleic acids, 10² non-target nucleic acids, 10³ non-target nucleic acids, 10⁴ non-target nucleic acids, 10⁵ non-target nucleic acids, 10⁶ non-target nucleic acids, 10⁷ non-target nucleic acids, 10⁸ non-target nucleic acids, 10⁹ non-target nucleic acids, or 10¹⁰ non-target nucleic acids. The target nucleic acid populations can be present at different concentrations or amounts in the sample.

[0319] FIG. 1 illustrates an exemplary method for programmable nuclease-based detection. The method can comprise collecting a sample. The sample can comprise any type of sample as described herein. The method can comprise preparing the sample. Sample preparation can comprise one or more sample preparation steps. The one or more sample preparation steps can be performed in any suitable order. The one or more sample preparation steps can comprise physical filtration of non-target materials using a macro filter. The one or more sample preparation steps can comprise nucleic acid purification. The one or more sample preparation steps can comprise lysis. The one or more sample preparation steps can comprise heat inactivation. The one or more sample preparation steps can comprise enzyme (e.g., PK) inactivation. The one or more sample preparation steps can comprise adding one or more enzymes or reagents to prepare the sample for target detection.

[0320] The method can comprise generating one or more droplets, aliquots, or subsamples from the sample. The one or more droplets, aliquots, or subsamples can correspond to a volumetric portion of the sample. The sample can be divided into 1, 2, 3, 4, 5, 6, 7, 8, 9, 10, 20, 30, 40, 50, 60, 70, 80, 90, 100, 200, 300, 400, 500, 600, 700, 800, 900, 1000, or more droplets, aliquots, or subsamples. In some embodiments, the sample is not divided into subsamples.

[0321] The method can comprise amplifying one or more targets within each droplet, aliquot, or subsample. Amplification of the one or more targets within each droplet can be performed in parallel and/or simultaneously for each droplet. Dividing the sample into a plurality of droplets can enhance a speed and/or an efficiency of the amplification process (e.g., a thermocycling process) since the droplets comprise a smaller volume of material than the bulk sample introduced. Amplifying the one or more targets within each individual droplet can also permit effective amplification of various target nucleic acids that cannot be amplified as efficiently in a bulk sample containing the various target nucleic acids if the bulk sample were to undergo a singular amplification process. In some embodiments, amplification is performed on the bulk sample without first dividing the sample into subsamples.

[0322] The method can further comprise using a CRISPR-based or programmable nuclease-based detection module to detect one or more targets (e.g., target sequences or target nucleic acids) in the sample. In some cases, the sample can be divided into a plurality of droplets, aliquots, or subsamples to facilitate sample preparation and to enhance the detection capabilities of the devices of the present disclosure. In some cases, the sample is not divided into subsamples.

[0323] In some embodiments, the sample can be provided manually to the detection device of the present disclosure. For example, a swab sample can be dipped into a solution and the sample/solution can be pipetted into the device. In other embodiments, the sample can be provided via an automated syringe. The automated syringe can be configured to control a flow rate at which the sample is provided to the detection device. The automated syringe can be configured to control a volume of the sample that is provided to the detection device over a predetermined period.

[0324] In some embodiments, the sample can be provided directly to the detection device of the present disclosure. For example, a swab sample can be inserted into a sample chamber on the detection device.

[0325] The sample can be prepared before one or more targets are detected within the sample. The sample preparation steps described herein can process a crude sample to generate a pure or purer sample. Sample preparation can one or more physical or chemical processes, including, for example, nucleic acid purification, lysis, binding, washing, and/or eluting. In certain instances, sample preparation can comprise the following steps, in any order, including sample collection, nucleic acid purification, heat inactivation, enzyme inactivation, and/or base/acid lysis.

[0326] In some embodiments, nucleic acid purification can be performed on the sample. Purification can comprise disrupting a biological matrix of a cell to release nucleic acids, denaturing structural proteins associated with the nucleic acids (nucleoproteins), inactivating nucleases that can degrade the isolated product (RNase and/or DNase), and/or removing contaminants (e.g., proteins, carbohydrates, lipids, biological or environmental elements, unwanted nucleic acids, and/or other cellular debris).

[0327] In some embodiments, lysis of a collected sample can be performed. Lysis can be performed using a protease (e.g., a Proteinase K or PK enzyme). Exemplary proteases include serine proteases (e.g., Proteinase K, Savinase®, trypsin, Protamex®, etc.), metalloproteinases (e.g., MMP-3, etc.), cysteine proteases (e.g, cathepsin B, papin, etc.), threonine proteases, aspartic proteases (e.g., renin, pepsin, cathepsin D, etc.), glutamic proteases, asparagine peptide lyases, or the like. In some cases, a solution of reagents can be used to lyse the cells in the sample and release the nucleic acids so that they are accessible to the programmable nuclease. Active ingredients of the solution can be chaotropic agents, detergents, salts, and can be of high osmolality, ionic strength, and pH. Chaotropic agents or chaotropes are substances that disrupt the three-dimensional structure in macromolecules such as proteins, DNA, or RNA. One example protocol may comprise a 4 M guanidinium isothiocyanate, 25 mM sodium citrate·2H20, 0.5% (w/v) sodium lauryl sarcosinate, and 0.1 M β-mercaptoethanol), but numerous commercial buffers for different cellular targets can also be used. Alkaline buffers can also be used for cells with hard shells, particularly for environmental samples. Detergents such as sodium dodecyl sulphate (SDS) and cetyl trimethylammonium bromide (CTAB) can also be implemented to chemical lysis buffers. Cell lysis can also be performed by physical, mechanical, thermal or enzymatic means, in addition to chemically-induced cell lysis mentioned previously. In some cases, depending on the type of sample, nanoscale barbs, nanowires, acoustic generators, integrated lasers, integrated heaters, and/or microcapillary probes can be used to perform lysis.

[0328] In certain instances, heat inactivation can be performed on the sample. In some embodiments, a processed/lysed sample can undergo heat inactivation to inactivate, in the lysed sample, the proteins used during lysing (e.g, a PK enzyme or a lysing reagent) and/or other residual proteins in the sample (e.g., RNases, DNases, viral proteins, etc.). In some cases, a heating element integrated into the detection device can be used for heat-inactivation. The heating element can be powered by a battery or another source of thermal or electric energy that is integrated with the detection device.

[0329] In certain instances, enzyme inactivation can be performed on the sample. In some embodiments, a processed/lysed sample can undergo enzyme inactivation to inhibit or inactivate, in the lysed sample, the proteins used during lysing (e.g., a PK enzyme or a lysing reagent) and/or other residual proteins in the sample (e.g., RNases, DNases, etc.). In some cases, a solution of reagents can be used to inactivate one or more enzymes present in the sample. Enzyme inactivation can occur before, during, or after lysis, when lysis is performed. For example, an RNase inhibitor may be included as a lysis reagent to inhibit native RNases within the sample (which might otherwise impair target and/or reporter detection downstream). Exemplary RNase inhibitors include RNAse Inhibitor, Murine (NEB), RnaseIn Plus (Promega), Protector Rnase Inhibitor (Roche), SuperaseIn (Ambion), RiboLock (Thermo), Ribosafe (Bioline), or the like. Alternatively, or in combination, when a protease is used for sample lysis, a protease inhibitor can be applied to the lysed sample to inactivate the protease prior to contacting the sample nucleic acids to the programmable nuclease. Additional application of heat may not be required to inhibit the protease (e.g., proteinase K) sufficiently to prevent additional activity of the protease (which could potentially impair programmable nuclease activity downstream, in some embodiments). Exemplary protease inhibitors include AEBSF, antipain, aprotinin, bestatin, chymostatin, EDTA, leupeptin, pepstatin A, phosphoramidon, PMSF, soybean trypsin inhibitor, TPCK, or the like. In some instances, enzyme inactivation may occur before, during, after, or instead of heat inactivation.

[0330] In some cases, a target nucleic acid within the sample can undergo amplification before binding to a guide nucleic acid, for example a crRNA of a CRISPR enzyme. The target nucleic acid within a purified sample can be amplified. In some instances, amplification can be accomplished using loop mediated amplification (LAMP), isothermal recombinase polymerase amplification (RPA), and/or polymerase chain reaction (PCR). In some instances, digital droplet amplification can used. Such nucleic acid amplification of the sample can improve at least one of a sensitivity, specificity, or accuracy of the detection of the target RNA. The reagents for nucleic acid amplification can comprise a recombinase, an oligonucleotide primer, a single-stranded DNA binding (SSB) protein, and a polymerase. The nucleic acid amplification can be transcription mediated amplification (TMA). Nucleic acid amplification can be helicase dependent amplification (HDA) or circular helicase dependent amplification (cHDA). In additional cases, nucleic acid amplification is strand displacement amplification (SDA). The nucleic acid amplification can be recombinase polymerase amplification (RPA). The nucleic acid amplification can be at least one of loop mediated amplification (LAMP) or the exponential amplification reaction (EXPAR). Nucleic acid amplification is, in some cases, by rolling circle amplification (RCA), ligase chain reaction (LCR), simple method amplifying RNA targets (SMART), single primer isothermal amplification (SPIA), multiple displacement amplification (MDA), nucleic acid sequence-based amplification (NASBA), hinge-initiated primer-dependent amplification of nucleic acids (HIP), nicking enzyme amplification reaction (NEAR), or improved multiple displacement amplification (IMDA). The nucleic acid amplification can be performed for no greater than 1, 2, 3, 4, 5, 6, 7, 8, 9, 10, 11, 12, 13, 14, 15, 16, 17, 18, 19, 20, 25, 30, 40, 50, or 60 minutes. Sometimes, the nucleic acid amplification is performed for from 1 to 60, from 5 to 55, from 10 to 50, from 15 to 45, from 20 to 40, or from 25 to 35 minutes. Sometimes, the nucleic acid amplification is performed for from 5 to 60, from 10 to 60, from 15 to 60, from 30 to 60, from 45 to 60, from 1 to 45, from 5 to 45, from 10 to 45, from 30 to 45, from 1 to 30, from 5 to 30, from 10 to 30, from 15 to 30, from 1 to 15, from 5 to 15, or from 10 to 15 minutes.

[0331] In some embodiments, amplification can comprise thermocycling of the sample. Thermocycling can be carried out for one or more droplets of the sample in parallel and/or independently in separate locations. This can be accomplished by methods such as (1) by holding droplets stationary in locations where a heating element is in close proximity to the droplet on one of the droplet sides and a heat sink element is in close proximity to the other side of the droplet, or (2) flowing the droplet through zones in a fluid channel where heat flows across it from a heating source to a heat sink. In some cases, one or more resistive heating elements can be used to perform thermocycling. Sometimes, the nucleic acid amplification reaction is performed at a temperature of around 20-45° C. The nucleic acid amplification reaction can be performed at a temperature no greater than 20° C., 25° C., 30° C., 35° C., 37° C., 40° C., 45° C., 50° C., 55° C., 60° C., or 65° C. The nucleic acid amplification reaction can be performed at a temperature of at least 20° C., 25° C., 30° C., 35° C., 37° C., 40° C., 45° C., 50° C., 55° C., 60° C., or 65° C. In some cases, the nucleic acid amplification reaction is performed at a temperature of from 20° C. to 45° C., from 25° C. to 40° C., from 30° C. to 40° C., or from 35° C. to 40° C. In some cases, the nucleic acid amplification reaction is performed at a temperature of from 45° C. to 65° C., from 50° C. to 65° C., from 55° C. to 65° C., or from 60° C. to 65° C. In some cases, the nucleic acid amplification reaction can be performed at a temperature that ranges from about 20° C. to 45° C., from 25° C. to 45° C., from 30° C. to 45° C., from 35° C. to 45° C., from 40° C. to 45° C., from 20° C. to 37° C., from 25° C. to 37° C., from 30° C. to 37° C., from 35° C. to 37° C., from 20° C. to 30° C., from 25° C. to 30° C., from 20° C. to 25° C., or from about 22° C. to 25° C. In some cases, the nucleic acid amplification reaction can be performed at a temperature that ranges from about 40° C. to 65° C., from 45° C. to 65° C., from 50° C. to 65° C., from 55° C. to 65° C., from 60° C. to 65° C., from 40° C. to 60° C., from 45° C. to 60° C., from 50° C. to 60° C., from 55° C. to 60° C., from 40° C. to 55° C., from 45° C. to 55° C., from 50° C. to 55° C., from 40° C. to 50° C., or from about 45° C. to 50° C.

[0332] Additionally, target nucleic acid can optionally be amplified before binding to the guide nucleic acid (e.g., crRNA) of the programmable nuclease (e.g., CRISPR enzyme). This amplification can be PCR amplification or isothermal amplification. This nucleic acid amplification of the sample can improve at least one of sensitivity, specificity, or accuracy of the detection the target RNA. The reagents for nucleic acid amplification can comprise a recombinase, a oligonucleotide primer, a single-stranded DNA binding (SSB) protein, and a polymerase. The nucleic acid amplification can be transcription mediated amplification (TMA). Nucleic acid amplification can be helicase dependent amplification (HDA) or circular helicase dependent amplification (cHDA). In additional cases, nucleic acid amplification is strand displacement amplification (SDA). The nucleic acid amplification can be recombinase polymerase amplification (RPA). The nucleic acid amplification can be at least one of loop mediated amplification (LAMP) or the exponential amplification reaction (EXPAR). Nucleic acid amplification is, in some cases, by rolling circle amplification (RCA), ligase chain reaction (LCR), simple method amplifying RNA targets (SMART), single primer isothermal amplification (SPIA), multiple displacement amplification (MDA), nucleic acid sequence based amplification (NASBA), hinge-initiated primer-dependent amplification of nucleic acids (HIP), nicking enzyme amplification reaction (NEAR), or improved multiple displacement amplification (IMDA). The nucleic acid amplification can be performed for no greater than 1, 2, 3, 4, 5, 6, 7, 8, 9, 10, 11, 12, 13, 14, 15, 16, 17, 18, 19, 20, 25, 30, 40, 50, or 60 minutes. Sometimes, the nucleic acid amplification reaction is performed at a temperature of around 20-45° C. Sometimes, the nucleic acid amplification reaction is performed at a temperature of around 45-65° C. The nucleic acid amplification reaction can be performed at a temperature no greater than 20° C., 25° C., 30° C., 35° C., 37° C., 40° C., 45° C., 50° C., 55° C., 60° C., or 65° C. The nucleic acid amplification reaction can be performed at a temperature of at least 20° C., 25° C., 30° C., 35° C., 37° C., 40° C., 45° C., 50° C., 55° C., 60° C., or 65° C.

[0333] FIG. 3A illustrates an example of a channel through which a continuous flow of a sample can travel to undergo a thermocycling procedure. The device can comprise one or more movable mechanisms that are integrated into the device. The one or more movable mechanisms can be powered using a battery that is integrated with the device. The one or more movable mechanisms can be configured to stop and start the continuous flow of the sample through the channel at one or more predetermined time intervals. The one or more movable mechanisms can be configured to chop or divide the continuous flow of the sample into a plurality of smaller volumes, which can be referred to herein as “droplets.” The one or more movable mechanisms can have an open configuration and a closed configuration. The open configuration can permit a continuous flow of the sample through one or more sections of the channel, as seen in FIG. 3A. The closed configuration can restrict or completely inhibit a flow of the sample through one or more sections of the channel, as seen in FIG. 3B. The closed configuration can permit a physical and/or thermal separation of one or more volumes or portions of the sample flowing through the channel. When the movable mechanisms are in the closed position, the movable mechanisms can provide a physical barrier between different volumes or portions of the sample flowing through the channel. The droplet volume can range from 0.01 to 1 microliter, 1 to 5 microliters and 5 to 50 microliters. The different volumes or partitions can correspond to the droplets described elsewhere herein. The movable mechanisms can switch from the open position to the closed position, or from the closed position to the open position, depending on an operation of a syringe that is providing the sample or another flow regulator that is controlling a flow of the sample through the channel. The movable mechanisms can be powered using a battery that is integrated with the device.

[0334] In some cases, the movable mechanism can comprise a plurality of valves. The plurality of valves can comprise, for example, a check valve. In some cases, the movable mechanism can comprise a plunger or a bristle. The plunger or bristle can have an open configuration and a closed configuration. As described above, the open configuration can permit a continuous flow of the sample through one or more sections of the channel, and the closed configuration can restrict or completely inhibit a flow of the sample through one or more sections of the channel. The closed configuration can permit a physical and/or thermal separation of one or more volumes or portions of the sample flowing through the channel. When in the open configuration, the plunger or the bristle can be positioned flush to a bottom of the channel so that the sample can flow through the channel. When in the closed configuration, the plunger or the bristle can be configured to extend from a bottom portion of the channel to a top portion of the channel so that the sample flow is restricted and the sample is divided into a plurality of different droplets, or partitions, that are physically and/or thermally isolated from each other. In some cases, the movable mechanism can comprise any physical object (e.g., a plate) that can be configured to restrict flow through the channel at one or more sections of the channel. In some cases, the movable mechanism can comprise a hinge or spring mechanism to move the movable mechanism between an open configuration and a closed configuration.

[0335] The movable mechanisms can be used to generate one or more droplets, aliquots, or subsamples. Each of the one or more droplets, aliquots, or subsamples generated using the movable mechanism can be physically and/or thermally isolated within a plurality of different portions within the channel. The droplets, aliquots, or subsamples can be physically constrained within different portions within the channel. The droplets, aliquots, or subsamples can be constrained between a first movable mechanism that is in a closed position and a second movable mechanism that is in a closed position. The first movable mechanism can be located at a first distance from an inlet of the channel, and the second movable mechanism can be located at a second distance from the inlet of the channel. The channel can be part of a closed system through which the sample can flow. In some cases, when the sample flow through an inlet of the channel is stopped (e.g., a plunger of a syringe containing the sample is pulled back), the one or more movable mechanisms can be placed in a closed configuration, thereby separating the sample already within the channel into a plurality of thermally and physically isolated droplets. Generating droplets, aliquots, or subsamples can simplify the solution, reduce a complexity of the solution, and enhance an accessibility of targets for amplification.

[0336] The one or more droplets, aliquots, or subsamples generated using the movable mechanism can undergo an amplification step or a thermocycling step as described elsewhere herein. In some cases, the one or more droplets generated using the movable mechanisms can come into contact with separate heating units and heat sinks while constrained between two movable mechanisms. Different sections of the channel can comprise a plurality of heating units and heat sinks configured to perform thermocycling for different droplets. Individual thermocycling of the droplets, aliquots, or subsamples can permit more efficient thermocycling of smaller volumes of fluid, and can require less energy usage (e.g., from a battery). One or more valves can control a flow or a movement of the sample through the channel. The one or more valves can comprise a check valve that is configured to restrict a movement of the sample or the one or more droplets such that the sample or the one or more droplets do not travel backwards towards an inlet portion of the channel. The one or more valves can control when the sample or the droplets come into thermal contact with the heating unit and/or the heat sink. The timing of such thermal contact can correspond to a timing of one or more thermocycling steps. In some cases, a first droplet of the sample can be in thermal contact with a first heating unit and a first heat sink, a second droplet of the sample can be in thermal contact with a second heating unit and a second heat sink, and so on.

[0337] As described above, the devices of the present disclosure can be configured to perform droplet digitization or droplet generation. Droplet digitization or generation can comprise splitting a volume of the sample into multiple droplets, aliquots, or subsamples. The sample can have a volume that ranges from about 10 microliters to about 500 microliters. The plurality of droplets, aliquots, or subsamples can have a volume that ranges from about 0.01 microliters to about 100 microliters. The plurality of droplets, aliquots, or subsamples can have a same or substantially similar volume. In some cases, the plurality of droplets, aliquots, or subsamples can have different volumes. In some cases, the droplets, aliquots, or subsamples can be generated using a physical filter or the one or more movable mechanisms described above. In some cases, each droplet of the sample can undergo one or more sample preparation steps (e.g., nucleic acid purification, lysis, heat inactivation, enzyme inactivation, amplification, etc.) independently and/or in parallel while the droplets are physically constrained or thermally isolated between two movable mechanisms.

[0338] After amplification, the sample can be remixed. The sample can be circulated through the detection chamber using a bulk circulation mechanism that is configured to stir the remixed sample around such that the remixed sample comes into contact with one or more programmable nuclease probes, as shown in FIG. 7A. In some cases, the sample can be provided on a portion of a surface of the detection chamber that is proximal to one or more programmable nuclease probes, as shown in FIG. 7C. In some cases, the detection chamber can be configured to direct the sample along one or more fluid flow paths that position the remixed sample adjacent and/or proximal to one or more programmable nuclease probes. The one or more fluid flow paths can be used to target delivery of at least a portion of the remixed droplets to one or more detection regions associated with the one or more programmable nuclease probes. The remixed droplets can be circulated through the detection chamber along one or more desired fluid flow paths with aid of a piezoelectric device.

[0339] In some embodiments, electrowetting can be used by the device for sample transport. In some cases, the device can be configured for electrowetting-on-dielectric (EWOD) applications. The devices of the present disclosure can comprise an array of independently addressable electrodes integrated into the device.

[0340] Described herein are various embodiments of a device for programmable nuclease-based (e.g., CRISPR-based) assays. FIG. 2A illustrates a top-down view of an exemplary device for CRISPR-based detection. The device can comprise a sample interface (200) that is configured to receive a sample. The sample can undergo one or more processing steps as described elsewhere herein. Any of the devices described herein may comprise a physical filter (201) to filter one or more particles from the sample that do not comprise the one or more targets (e.g., a gene of interest). In some embodiments, the device may comprise thermocycling components (202). In some cases, the sample can be divided into a plurality of digitized droplets. The plurality of digitized droplets can be provided in a plurality of different chambers of the device. The plurality of digitized droplets can undergo separate processing steps (e.g., thermocycling). In some embodiments, the independent digital reactions can be conducted in parallel with no cross-talk therebetween. In other embodiments, the independent digital reactions can be conducted in parallel with a minimal level or amount of cross-talk. The plurality of droplets can be mixed together after the separate processing steps upon completion of the processing steps. A plurality of programmable nuclease probes comprising one or more programmable nucleases (e.g., Cas enzymes) can be operatively coupled to the detection chamber (203) to detect one or more targets in the sample or the plurality of digitized droplets that are mixed together in the detection chamber. One or more detectors (204) may be configured to detect a signal from the detection chamber as described herein. A side profile of an embodiment of an exemplary programmable nuclease-based device is shown in FIG. 2B. In some embodiments, the device may comprise one or more thermocycling compartments (205) as seen in sideview. In some embodiments, the device may comprise a detection chamber (206). In some embodiments, the device may comprise one or more detectors (207). In some embodiments, the device may comprise a battery (208). In some embodiments, the device may comprise telemedicine components.

[0341] FIGS. 4A, 4B, 5A, and 5B illustrate an exemplary programmable nuclease probe that can be used in a compatible manner with the devices of the present disclosure. The programmable nuclease probe can comprise a guide nucleic acid complexed with a programmable nuclease. The programmable nuclease can comprise any type of programmable nuclease as described herein. In some cases, the programmable nuclease probe may comprise a guide nucleic acid complexed with a CRISPR enzyme. For example, FIG. 4A shows unbound target amplicons in the circulation chamber prior to binding to a guide RNA, which in turn is contacted to a programmable nuclease (e.g., a CRISPR enzyme). The guide RNA-CRISPR enzyme complex also includes a reporter. The programmable nuclease probe (e.g., a CRISPR probe) is immobilized to an immobilization matrix, where the interior side of the immobilization matrix is exposed to the inside wall of the circulation chamber. The guide nucleic acid or guide RNA is exposed to the target amplicons inside the circulation chamber. The reporter is in proximity to the “exterior” side of the immobilization matrix, where the exterior side of the immobilization matrix be in proximity to a detection region. FIG. 4B illustrates a programmable nuclease probe (e.g., a CRISPR probe) after binding with a complementary target amplicon. The binding event triggers a trans-cut that releases the reporter into a detectable region or changes the reporter. Detection mechanisms can involve interferometry, surface plasmon resonance, electrochemical detection such as potentiometry, or other detection mechanisms.

[0342] In certain instances, as seen in FIGS. 5A and 5B, the reporter of the programmable nuclease probe can initiate a signal amplification reaction with another molecular species after the complementary binding induced trans-cutting. Such species can be a reactive solid or gel matrix, or other reactive entity to generate an amplified signal during detection. The signal amplification reaction can be physical or chemical in nature. In certain instances, as seen in FIGS. 5A and 5B, after a complementary binding induced trans-cut, the released reporter, X, can initiate an interaction and/or a reaction with another entity, Y to produce an amplified or modified signal. Such entities can comprise a molecular species, a solid, a gel, or other entities. The signal amplification interaction can be a physical or chemical reaction. In some embodiments, the interaction involves free-radical, anionic, cationic or coordination polymerization reactions. In other embodiments the cut reporter can trigger aggregation, or agglutination, of molecules, cells, or nanoparticles. In some instances, the cut reporter can interact with a semiconductor material. In some embodiments, the chemical or physical change caused by the interaction is detected by optical detection means such as interferometry, surface plasmon resonance, reflectivity or other. In other embodiments, the chemical or physical change caused by the interaction is detected by potentiometric, amperometric, field effect transistor, or other electronic means

[0343] The programmable nuclease probe can comprise a programmable nuclease and/or a guide nucleic acid. The guide nucleic acid can bind to a target nucleic acid, as described in greater detail below. In some case, to minimize off-target binding (which can slow down detection or inhibit accurate detection), the device can be configured to generate an electro-potential gradient or to provide heat energy to one or more regions proximal to the programmable nuclease probe, to enhance targeting.

[0344] In some embodiments, one or more guide nucleic acids can be used to carry out highly efficient, rapid, and accurate reactions for detecting whether a target nucleic acid is present in a sample. The guide nucleic acid binds to the single stranded target nucleic acid comprising a portion of a nucleic acid from a virus or a bacterium or other agents responsible for a disease as described herein. The guide nucleic acid can bind to the single stranded target nucleic acid comprising a portion of a nucleic acid from a bacterium or other agents responsible for a disease as described herein and further comprising a mutation, such as a single nucleotide polymorphism (SNP), which can confer resistance to a treatment, such as antibiotic treatment. The guide nucleic acid binds to the single stranded target nucleic acid comprising a portion of a nucleic acid from a cancer gene or gene associated with a genetic disorder as described herein. The guide nucleic acid is complementary to the target nucleic acid. Often the guide nucleic acid binds specifically to the target nucleic acid. The target nucleic acid can be a RNA, DNA, or synthetic nucleic acids. A guide nucleic acid can comprise a sequence that is reverse complementary to the sequence of a target nucleic acid. A guide nucleic acid can be a crRNA. Sometimes, a guide nucleic acid may comprise a crRNA and tracrRNA. The guide nucleic acid can bind specifically to the target nucleic acid. In some cases, the guide nucleic acid is not naturally occurring and made by artificial combination of otherwise separate segments of sequence. Often, the artificial combination is performed by chemical synthesis, by genetic engineering techniques, or by the artificial manipulation of isolated segments of nucleic acids. The target nucleic acid can be designed and made to provide desired functions. In some cases, the targeting region of a guide nucleic acid is 20 nucleotides in length. The targeting region of the guide nucleic acid can have a length of at least 10, 11, 12, 13, 14, 15, 16, 17, 18, 19, 20, 21, 22, 23, 24, 25, 26, 27, 28, 29, or 30 nucleotides in length. In some instances, the targeting region of the guide nucleic acid is 10, 11, 12, 13, 14, 15, 16, 17, 18, 19, 20, 21, 22, 23, 24, 25, 26, 27, 28, 29, or 30 nucleotides in length. In some cases, the targeting region of a guide nucleic acid has a length from exactly or about 12 nucleotides (nt) to about 80 nt, from about 12 nt to about 50 nt, from about 12 nt to about 45 nt, from about 12 nt to about 40 nt, from about 12 nt to about 35 nt, from about 12 nt to about 30 nt, from about 12 nt to about 25 nt, from about 12 nt to about 20 nt, from about 12 nt to about 19 nt, from about 19 nt to about 20 nt, from about 19 nt to about 25 nt, from about 19 nt to about 30 nt, from about 19 nt to about 35 nt, from about 19 nt to about 40 nt, from about 19 nt to about 45 nt, from about 19 nt to about 50 nt, from about 19 nt to about 60 nt, from about 20 nt to about 25 nt, from about 20 nt to about 30 nt, from about 20 nt to about 35 nt, from about 20 nt to about 40 nt, from about 20 nt to about 45 nt, from about 20 nt to about 50 nt, or from about 20 nt to about 60 nt. In some cases, the targeting region of a guide nucleic acid has a length of from about 10 nt to about 60 nt, from about 20 nt to about 50 nt, or from about 30 nt to about 40 nt. In some cases, the targeting region of a guide nucleic acid has a length of from 15 nt to 55 nt, from 25 nt to 55 nt, from 35 nt to 55 nt, from 45 nt to 55 nt, from 15 nt to 45 nt, from 25 nt to 45 nt, from 35 nt to 45 nt, from 15 nt to 35 nt, from 25 nt to 35 nt, or from 15 nt to 25 nt. It is understood that the sequence of a polynucleotide need not be 100% complementary to that of its target nucleic acid to be specifically hybridizable or bind specifically. The guide nucleic acid can have a sequence comprising at least one uracil in a region from nucleic acid residue 5 to 20 that is reverse complementary to a modification variable region in the target nucleic acid. The guide nucleic acid, in some cases, has a sequence comprising at least one uracil in a region from nucleic acid residue 5 to 9, 10 to 14, or 15 to 20 that is reverse complementary to a modification variable region in the target nucleic acid. The guide nucleic acid can have a sequence comprising at least one uracil in a region from nucleic acid residue 5 to 20 that is reverse complementary to a methylation variable region in the target nucleic acid. The guide nucleic acid, in some cases, has a sequence comprising at least one uracil in a region from nucleic acid residue 5 to 9, 10 to 14, or 15 to 20 that is reverse complementary to a methylation variable region in the target nucleic acid.

[0345] The guide nucleic acid can be selected from a group of guide nucleic acids that have been tiled against the nucleic acid of a strain of an infection or genomic locus of interest. The guide nucleic acid can be selected from a group of guide nucleic acids that have been tiled against the nucleic acid of a strain of HPV 16 or HPV 18. Often, guide nucleic acids that are tiled against the nucleic acid of a strain of an infection or genomic locus of interest can be pooled for use in a method described herein. Often, these guide nucleic acids are pooled for detecting a target nucleic acid in a single assay. The pooling of guide nucleic acids that are tiled against a single target nucleic acid can enhance the detection of the target nucleic using the methods described herein. The pooling of guide nucleic acids that are tiled against a single target nucleic acid can ensure broad coverage of the target nucleic acid within a single reaction using the methods described herein. The tiling, for example, is sequential along the target nucleic acid. Sometimes, the tiling is overlapping along the target nucleic acid. In some instances, the tiling may comprise gaps between the tiled guide nucleic acids along the target nucleic acid. In some instances, the tiling of the guide nucleic acids is non-sequential. Often, a method for detecting a target nucleic acid may comprise contacting a target nucleic acid to a pool of guide nucleic acids and a programmable nuclease, wherein a guide nucleic acid of the pool of guide nucleic acids has a sequence selected from a group of tiled guide nucleic acid that is reverse complementary to a sequence of a target nucleic acid; and assaying for a signal produce by cleavage of at least some detector nucleic acids of a population of detector nucleic acids. Pooling of guide nucleic acids can ensure broad spectrum identification, or broad coverage, of a target species within a single reaction. This can be particularly helpful in diseases or indications, like sepsis, that can be caused by multiple organisms.

[0346] In some embodiments, programmable nucleases can be used to carry out highly efficient, rapid, and accurate reactions for detecting whether a target nucleic acid is present in a sample. A programmable nuclease can comprise a programmable nuclease capable of being activated when complexed with a guide nucleic acid and target nucleic acid. The programmable nuclease can become activated after binding of a guide nucleic acid with a target nucleic acid, in which the activated programmable nuclease can cleave the target nucleic acid and can have trans cleavage activity. Trans cleavage activity can be non-specific cleavage of nearby single-stranded nucleic acids by the activated programmable nuclease, such as trans cleavage of detector nucleic acids with a detection moiety. Once the detector nucleic acid is cleaved by the activated programmable nuclease, the detection moiety can be released from the detector nucleic acid and can generate a signal. A signal can be a calorimetric, potentiometric, amperometric, optical (e.g., fluorescent, colorimetric, etc.), or piezo-electric signal. Often, the signal is present prior to detector nucleic acid cleavage and changes upon detector nucleic acid cleavage. Sometimes, the signal is absent prior to detector nucleic acid cleavage and is present upon detector nucleic acid cleavage. The detectable signal can be immobilized on a support medium for detection. The programmable nuclease can be a CRISPR-Cas (clustered regularly interspaced short palindromic repeats-CRISPR associated) nucleoprotein complex with trans cleavage activity, which can be activated by binding of a guide nucleic acid with a target nucleic acid. The CRISPR-Cas nucleoprotein complex can comprise a Cas protein (also referred to as a Cas nuclease) complexed with a guide nucleic acid, which can also be referred to as CRISPR enzyme. A guide nucleic acid can be a CRISPR RNA (crRNA). Sometimes, a guide nucleic acid may comprise a crRNA and a trans-activating crRNA (tracrRNA).

[0347] The programmable nuclease system used to detect modified target nucleic acids can comprise CRISPR RNAs (crRNAs), trans-activating crRNAs (tracrRNAs), Cas proteins, and detector nucleic acids.

[0348] Described herein are reagents comprising a programmable nuclease capable of being activated when complexed with the guide nucleic acid and the target nucleic acid segment or portion. A programmable nuclease can be capable of being activated when complexed with a guide nucleic acid and the target sequence. The programmable nuclease can be activated upon binding of the guide nucleic acid to its target nucleic acid and degrades non-specifically nucleic acid in its environment. The programmable nuclease has trans cleavage activity once activated. A programmable nuclease can be a Cas protein (also referred to, interchangeably, as a Cas nuclease). A crRNA and Cas protein can form a CRISPR enzyme.

[0349] Several programmable nucleases are consistent with the methods and devices of the present disclosure. For example, CRISPR/Cas enzymes are programmable nucleases used in the methods and systems disclosed herein. CRISPR/Cas enzymes can include any of the known Classes and Types of CRISPR/Cas enzymes. Programmable nucleases disclosed herein include Class 1 CRISPR/Cas enzymes, such as the Type I, Type IV, or Type III CRISPR/Cas enzymes. Programmable nucleases disclosed herein also include the Class 2 CRISPR/Cas enzymes, such as the Type II, Type V, and Type V1 CRISPR/Cas enzymes. Preferable programmable nucleases included in the several devices disclosed herein (e.g., a microfluidic device such as a pneumatic valve device or a sliding valve device or a lateral flow assay) and methods of use thereof include a Type V or Type V1 CRISPR/Cas enzyme.

[0350] In some embodiments, the Type V CRISPR/Cas enzyme is a programmable Cas12 nuclease. Type V CRISPR/Cas enzymes (e.g., Cas12 or Cas14) lack an HNH domain. A Cas12 nuclease of the present disclosure cleaves a nucleic acid via a single catalytic RuvC domain. The RuvC domain is within a nuclease, or “NUC” lobe of the protein, and the Cas12 nucleases further comprise a recognition, or “REC” lobe. The REC and NUC lobes are connected by a bridge helix and the Cas12 proteins additionally include two domains for PAM recognition termed the PAM interacting (PI) domain and the wedge (WED) domain. In some instances, a programmable Cas 12 nuclease can be a Cas12a (also referred to as Cpf1) protein, a Cas12b protein, Cas 12c protein, Cas12d protein, or a Cas12e protein.

[0351] In some embodiments, the programmable nuclease can be Cas13. Sometimes the Cas13 can be Cas13a, Cas13b, Cas13c, Cas13d, or Cas13e. In some cases, the programmable nuclease can be Mad7 or Mad2. In some cases, the programmable nuclease can be Cas12. Sometimes the Cas12 can be Cas12a, Cas12b, Cas12c, Cas12d, or Cas12e. In some cases, the Cas12 can be a Cas12 variant having the sequence of SEQ ID NO: 17 (or a sequence with at least 60%, 70%, 80%, 90%, or 95% identity thereto). In some cases, the programmable nuclease can be Csm1, Cas9, C2c4, C2c8, C2c5, C2c10, C2c9, or CasZ. Sometimes, the Csm1 can also be also called smCms1, miCms1, obCms1, or suCms1. Sometimes Cas13a can also be also called C2c2. Sometimes CasZ can also be called Cas14a, Cas14b, Cas14c, Cas14d, Cas14e, Cas14f, Cas14g, or Cas14h. Sometimes, the programmable nuclease can be a type V CRISPR-Cas system. In some cases, the programmable nuclease can be a type V1 CRISPR-Cas system. Sometimes the programmable nuclease can be a type III CRISPR-Cas system. Sometimes the programmable nuclease can be an engineered nuclease that is not from a naturally occurring CRISPR-Cas system. In some cases, the programmable nuclease can be from at least one of Leptotrichia shahii (Lsh), Listeria seeligeri (Lse), Leptotrichia buccalis (Lbu), Leptotrichia wadeu (Lwa), Rhodobacter capsulatus (Rca), Herbinix hemicellulosilytica (Hhe), Paludibacter propionicigenes (Ppr), Lachnospiraceae bacterium (Lba), [Eubacterium] rectale (Ere), Listeria newyorkensis (Lny), Clostridium aminophilum (Cam), Prevotella sp. (Psm), Capnocytophaga canimorsus (Cca, Lachnospiraceae bacterium (Lba), Bergeyella zoohelcum (Bzo), Prevotella intermedia (Pin), Prevotella buccae (Pbu), Alistipes sp. (Asp), Riemerella anatipestifer (Ran), Prevotella aurantiaca (Pau), Prevotella saccharolytica (Psa), Prevotella intermedia (Pin2), Capnocytophaga canimorsus (Cca), Porphyromonas gulae (Pgu), Prevotella sp. (Psp), Porphyromonas gingivalis (Pig), Prevotella intermedia (Pin3), Enterococcus italicus (Ei), Lactobacillus salivarius (Ls), or Thermus thermophilus (Tt). Sometimes the Cas13 is at least one of LbuCas13a, LwaCas13a, LbaCas13a, HheCas13a, PprCas13a, EreCas13a, CamCas13a, or LshCas13a. The trans cleavage activity of the CRISPR enzyme can be activated when the crRNA is complexed with the target nucleic acid. The trans cleavage activity of the CRISPR enzyme can be activated when the guide nucleic acid comprising a tracrRNA and crRNA are complexed with the target nucleic acid. The target nucleic acid can be RNA or DNA.

[0352] In some embodiments, a programmable nuclease as disclosed herein is an RNA-activated programmable RNA nuclease. In some embodiments, a programmable nuclease as disclosed herein is a DNA-activated programmable RNA nuclease. In some embodiments, a programmable nuclease is capable of being activated by a target RNA to initiate trans cleavage of an RNA reporter and is capable of being activated by a target DNA to initiate trans cleavage of an RNA reporter, such as a Type V1 CRISPR/Cas enzyme (e.g., a Cas13 nuclease). For example, Cas 13a of the present disclosure can be activated by a target RNA to initiate trans cleavage activity of the Cas13a for the cleavage of an RNA reporter and can be activated by a target DNA to initiate trans cleavage activity of the Cas 13a for trans cleavage of an RNA reporter. An RNA reporter can be an RNA-based reporter. In some embodiments, the Cas13a recognizes and detects ssDNA to initiate transcleavage of RNA reporters. Multiple Cas13a isolates can recognize, be activated by, and detect target DNA, including ssDNA, upon hybridization of a guide nucleic acid with the target DNA. For example, Lbu-Cas13a and Lwa-Cas13a can both be activated to transcollaterally cleave RNA reporters by target DNA. Thus, Type V1 CRISPR/Cas enzyme (e.g., a Cas13 nuclease, such as Cas13a) can be DNA-activated programmable RNA nucleases, and therefore can be used to detect a target DNA using the methods as described herein. DNA-activated programmable RNA nuclease detection of ssDNA can be robust at multiple pH values. For example, target ssDNA detection by Cas13 can exhibit consistent cleavage across a wide range of pH conditions, such as from a pH of 6.8 to a pH of 8.2. In contrast, target RNA detection by Cas13 can exhibit high cleavage activity of pH values from 7.9 to 8.2. In some embodiments, a DNA-activated programmable RNA nuclease that also is capable of being an RNA-activated programmable RNA nuclease, can have DNA targeting preferences that are distinct from its RNA targeting preferences. For example, the optimal ssDNA targets for Cas13a have different properties than optimal RNA targets for Cas13a. As one example, gRNA performance on ssDNA can not necessarily correlate with the performance of the same gRNAs on RNA. As another example, gRNAs can perform at a high level regardless of target nucleotide identity at a 3′ position on a target RNA sequence. In some embodiments, gRNAs can perform at a high level in the absence of a G at a 3′ position on a target ssDNA sequence. Furthermore, target DNA detected by Cas13 disclosed herein can be directly taken from organisms or can be indirectly generated by nucleic acid amplification methods, such as PCR and LAMP or any amplification method described herein. Key steps for the sensitive detection of a target DNA, such as a target ssDNA, by a DNA-activated programmable RNA nuclease, such as Cas13a, can include: (1) production or isolation of DNA to concentrations above about 0.1 nM per reaction for in vitro diagnostics, (2) selection of a target sequence with the appropriate sequence features to enable DNA detection as these features are distinct from those required for RNA detection, and (3) buffer composition that enhances DNA detection.

[0353] The detection of a target DNA by a DNA-activated programmable RNA nuclease can be connected to a variety of readouts including fluorescence, lateral flow, electrochemistry, or any other readouts described herein. Multiplexing of programmable DNA nuclease, such as a Type V CRISPR-Cas protein, with a DNA-activated programmable RNA nuclease, such as a Type V1 protein, with a DNA reporter and an RNA reporter, can enable multiplexed detection of target ssDNAs or a combination of a target dsDNA and a target ssDNA, respectively. Multiplexing of different RNA-activated programmable RNA nucleases that have distinct RNA reporter cleavage preferences can enable additional multiplexing. Methods for the generation of ssDNA for DNA-activated programmable RNA nuclease-based diagnostics can include (1) asymmetric PCR, (2) asymmetric isothermal amplification, such as RPA, LAMP, SDA, etc. (3) NEAR for the production of short ssDNA molecules, and (4) conversion of RNA targets into ssDNA by a reverse transcriptase followed by RNase H digestion. Thus, DNA-activated programmable RNA nuclease detection of target DNA is compatible with the various systems, kits, compositions, reagents, and methods disclosed herein. For example, target ssDNA detection by Cas13a can be employed in a detection device as disclosed herein.

[0354] In any of the embodiments described herein, the programmable nuclease can comprise a programmable nuclease capable of being activated when complexed with a guide nucleic acid and target nucleic acid. The programmable nuclease can become activated after binding of a guide nucleic acid with a target nucleic acid, in which the activated programmable nuclease can cleave the target nucleic acid, which can initiate trans cleavage activity. In some cases, the trans cut or trans cleavage can cut and/or release a reporter. In other cases, the trans cut or trans cleavage can produce an analog of a target, which can be directly detected. Trans cleavage activity can be non-specific cleavage of nearby nucleic acids by the activated programmable nuclease, such as trans cleavage of detector nucleic acids with a detection moiety. Once the detector nucleic acid is cleaved by the activated programmable nuclease, the detection moiety can be released from the detector nucleic acid and can generate a signal. For example, the detection moiety can correspond to the element, or moiety, (X) shown in FIG. 4A, 4B, 5A, 5B, and FIG. 6. The signal can be immobilized on a support medium for detection. The signal can be visualized to assess whether a target nucleic acid is present or absent.

[0355] Reporters, which can be referred to interchangeably as reporters or detector nucleic acids, can be used in conjunction with the compositions disclosed herein (e.g., programmable nucleases, guide nucleic acids, etc.) to carry out highly efficient, rapid, and accurate reactions for detecting whether a target nucleic acid is present in a sample. The reporter can be suspended in solution or immobilized on a surface. For example, the reporter can be immobilized on the surface of a chamber in a device as disclosed herein. In some cases, the reporter can be immobilized on beads, such as magnetic beads, in a chamber of a device as disclosed herein where they are held in position by a magnet placed below the chamber. The reporter can be capable of being cleaved by the activated programmable nuclease, thereby generating a detectable signal. The detectable signal can correspond to a release of one or more elements (X) as illustrated in FIGS. 5A and 5B. The release of the one or more elements (X) can initiate a reaction with another element (Y) when the element (Y) is in the presence of the element (X). The reaction between the element (Y) and the element (X) can initiate a chemical chain reaction in a solid phase material. Such a chemical chain reaction can produce one or more physical or chemical changes. In some cases, the physical or chemical changes can be optically detected. In some embodiments, one or more cascade amplification reactions can occur to further amplify the signal before sensing or detection. There can be a single point of attachment between the reporter and the element (X). Cutting the single point of attachment can release a macro molecule (X), which can undergo a series of reactions based on the macro molecule (X) itself. In any of the embodiments described herein, the reporter can comprise a single stranded detector nucleic acid comprising a detection moiety.

[0356] As used herein, a detector nucleic acid is used interchangeably with reporter or reporter. In some cases, the detector nucleic acid is a single-stranded nucleic acid comprising deoxyribonucleotides. In other cases, the detector nucleic acid is a single-stranded nucleic acid comprising ribonucleotides. The detector nucleic acid can be a single-stranded nucleic acid comprising at least one deoxyribonucleotide and at least one ribonucleotide. In some cases, the detector nucleic acid is a single-stranded nucleic acid comprising at least one ribonucleotide residue at an internal position that functions as a cleavage site. In some cases, the detector nucleic acid may comprise at least 2, 3, 4, 5, 6, 7, 8, 9, or 10 ribonucleotide residues at an internal position. In some cases, the detector nucleic acid may comprise from 2 to 10, from 3 to 9, from 4 to 8, or from 5 to 7 ribonucleotide residues at an internal position. In some cases, the detector nucleic acid may comprise from 3 to 10, from 4 to 10, from 5 to 10, from 6 to 10, from 7 to 10, from 8 to 10, from 9 to 10, from 2 to 8, from 3 to 8, from 5 to 8, from 6 to 8, from 7 to 8, from 2 to 5, from 3 to 5, or from 4 to 5 ribonucleotide residues at an internal position. Sometimes the ribonucleotide residues are continuous. Alternatively, the ribonucleotide residues are interspersed in between non-ribonucleotide residues. In some cases, the detector nucleic acid has only ribonucleotide residues. In some cases, the detector nucleic acid has only deoxyribonucleotide residues. In some cases, the detector nucleic acid may comprise nucleotides resistant to cleavage by the programmable nuclease described herein. In some cases, the detector nucleic acid may comprise synthetic nucleotides. In some cases, the detector nucleic acid may comprise at least one ribonucleotide residue and at least one non-ribonucleotide residue. In some cases, the detector nucleic acid is 5-20, 5-15, 5-10, 7-20, 7-15, or 7-10 nucleotides in length. In some cases, the detector nucleic acid is from 3 to 20, from 4 to 20, from 5 to 20, from 6 to 20, from 7 to 20, from 8 to 20, from 9 to 20, from 10 to 20, from 15 to 20, from 3 to 15, from 4 to 15, from 5 to 15, from 6 to 15, from 7 to 15, from 8 to 15, from 9 to 15, from 10 to 15, from 3 to 10, from 4 to 10, from 5 to 10, from 6 to 10, from 7 to 10, from 8 to 10, from 9 to 10, from 3 to 8, from 4 to 8, from 5 to 8, from 6 to 8, or from 7 to 8 nucleotides in length. In some cases, the detector nucleic acid may comprise at least one uracil ribonucleotide. In some cases, the detector nucleic acid may comprise at least two uracil ribonucleotides. Sometimes the detector nucleic acid has only uracil ribonucleotides. In some cases, the detector nucleic acid may comprise at least one adenine ribonucleotide. In some cases, the detector nucleic acid may comprise at least two adenine ribonucleotides. In some cases, the detector nucleic acid has only adenine ribonucleotides. In some cases, the detector nucleic acid may comprise at least one cytosine ribonucleotide. In some cases, the detector nucleic acid may comprise at least two cytosine ribonucleotides. In some cases, the detector nucleic acid may comprise at least one guanine ribonucleotide. In some cases, the detector nucleic acid may comprise at least two guanine ribonucleotides. A detector nucleic acid can comprise only unmodified ribonucleotides, only unmodified deoxyribonucleotides, or a combination thereof. In some cases, the detector nucleic acid is from 5 to 12 nucleotides in length. In some cases, the detector nucleic acid is at least 2, 3, 4, 5, 6, 7, 8, 9, 10, 11, 12, 13, 14, 15, 16, 17, 18, 19, 20, 21, 22, 23, 24, 25, 26, 27, 28, 29, or 30 nucleotides in length. In some cases, the detector nucleic acid is 2, 3, 4, 5, 6, 7, 8, 9, 10, 11, 12, 13, 14, 15, 16, 17, 18, 19, 20, 21, 22, 23, 24, 25, 26, 27, 28, 29, or 30 nucleotides in length. For cleavage by a programmable nuclease comprising Cas13, a detector nucleic acid can be 5, 8, or 10 nucleotides in length. For cleavage by a programmable nuclease comprising Cas12, a detector nucleic acid can be 10 nucleotides in length.

[0357] The single stranded detector nucleic acid can comprise a detection moiety capable of generating a first detectable signal. Sometimes the detector nucleic acid may comprise a protein capable of generating a signal. A signal can be a calorimetric, potentiometric, amperometric, optical (e.g., fluorescent, colorometric, etc.), or piezo-electric signal. In some cases, a detection moiety is on one side of the cleavage site. Optionally, a quenching moiety is on the other side of the cleavage site. Sometimes the quenching moiety is a fluorescence quenching moiety. In some cases, the quenching moiety is 5′ to the cleavage site and the detection moiety is 3′ to the cleavage site. In some cases, the detection moiety is 5′ to the cleavage site and the quenching moiety is 3′ to the cleavage site. Sometimes the quenching moiety is at the 5′ terminus of the detector nucleic acid. Sometimes the detection moiety is at the 3′ terminus of the detector nucleic acid. In some cases, the detection moiety is at the 5′ terminus of the detector nucleic acid. In some cases, the quenching moiety is at the 3′ terminus of the detector nucleic acid. In some cases, the single-stranded detector nucleic acid is at least one population of the single-stranded nucleic acid capable of generating a first detectable signal. In some cases, the single-stranded detector nucleic acid is a population of the single stranded nucleic acid capable of generating a first detectable signal. Optionally, there are more than one population of single-stranded detector nucleic acid. In some cases, there are 2, 3, 4, 5, 6, 7, 8, 9, 10, 11, 12, 13, 14, 15, 20, 30, 40, 50, or greater than 50, or any number spanned by the range of this list of different populations of single-stranded detector nucleic acids capable of generating a detectable signal. In some cases, there are from 2 to 50, from 3 to 40, from 4 to 30, from 5 to 20, or from 6 to 10 different populations of single-stranded detector nucleic acids capable of generating a detectable signal. In some cases there are from 2 to 50, from 5 to 50, from 10 to 50, from 15 to 50, from 20 to 50, from 25 to 50, from 30 to 50, from 35 to 50, from 40 to 50, from 2 to 40, from 5 to 40, from 10 to 40, from 15 to 40, from 20 to 40, from 25 to 40, from 30 to 40, from 35 to 40, from 2 to 30, from 5 to 30, from 10 to 30, from 15 to 30, from 20 to 30, from 25 to 30, from 2 to 20, from 5 to 20, from 10 to 20, from 15 to 20, from 2 to 10, or from 5 to 10 different populations of single-stranded detector nucleic acids capable of generating a detectable signal.

[0358] In some embodiments, target nucleic acid amplicons are detected by immobilized programmable nuclease probes, such as, for example, CRISPR CAS guide RNA probes (referred to as CRISPR probe). Upon a complementary binding event between a target nucleic acid amplicon and a programmable nuclease probe (e.g., an immobilized CRISPR CAS/guide RNA complex) a cutting event will occur that release a reporter that is then detected by a sensor. There are two main schemes for detection of the binding events between the target and the programmable nuclease probe, a mobile phase scheme as illustrated in FIG. 7A and a stationary phase scheme as illustrated in FIG. 7C. In any of the embodiments described herein, each programmable nuclease probe can have one or more programmable nucleases (e.g., CRISPR enzymes) with one or more specific guide RNAs for detecting different target nucleic acids or different classes of target nucleic acids.

[0359] In certain circumstances, a mobile phase detection scheme (FIG. 7A) is used. In these circumstances, the remixed sample is flown through a channel. The walls of the channel can comprise one or more regions on which one or more programmable nuclease probes or CRISPR probes are disposed. The programmable nuclease probes or CRISPR probes can comprise a guide nucleic acid (e.g., a guide RNA) complexed with a programmable nuclease as described elsewhere herein. The guide nucleic acid and/or the programmable nuclease can be immobilized relative to the walls of the channel. The guide nucleic acid and/or the programmable nuclease can be exposed to the remixed sample flowing through the channel. Reporter compounds can be cut and released upon a complementary binding event of a target nucleic acid amplicon and a specific guide nucleic acid. The reporter compounds can freely participate in one or more cascading amplification reactions that generate an amplified signal, as illustrated in FIG. 6. The amplified signal can be detected using one or more sensors as described herein.

[0360] In some embodiments, a stationary phase detection scheme is used. In these embodiments the remixed sample can contain one or more target nucleic acid amplicon sequence types and copies thereof. FIG. 7B shows a top-down view of a plurality of target amplicons that can interact with programmable nuclease probes positioned at known locations on the interior walls of the reaction chamber. FIG. 7C shows a cross-sectional side view of the detection chamber with a target amplicon interacting with a programmable nuclease probe. The guide RNA of the programmable nuclease or CRISPR probe can be immobilized adjacent to a bottom surface of the chamber. When a complementary interaction between the probe and the target occurs, the CRISPR enzyme will cut and release a reporter which will then be sensed. Since the specific guide RNA of the immobilized programmable nuclease or CRISPR probe can be spatially registered, multiplexed detection can be achieved. In some cases, where one sensor corresponds to one immobilized probe, electrical detection can be used. Other methods of detection can also be used, such as optical imaging, surface plasmon resonance (SPR), and/or interferometric sensing.

[0361] The plurality of programmable nuclease probes shown in FIG. 2, FIG. 7A, and FIG. 7C and described herein can be arranged in various configurations. For example, the plurality of programmable nuclease probes can be arranged in a lateral configuration. Alternatively, the plurality of programmable nuclease probes can be arranged in a circular configuration such that each programmable nuclease probe is equidistant from a common center point. In some cases, the plurality of programmable nuclease probes can be distributed with a same separation distance or spacing between the programmable nuclease probes. In other cases, a first programmable nuclease probe and a second programmable nuclease probe can be separated by a first separation distance or spacing, and a third programmable nuclease probe and a fourth programmable nuclease probe can be separated by a second separation distance or spacing that is different than the first separation distance or spacing.

[0362] As described above, the single stranded detector nucleic acid can comprise a detection moiety capable of generating a first detectable signal. Sometimes the detector nucleic acid may comprise a protein capable of generating a signal. A signal can be a colorimetric, potentiometric, amperometric, optical (e.g., fluorescent, colorometric, etc.), or piezo-electric signal. The generation of the detectable signal from the release of the detection moiety indicates that cleavage by the programmable nuclease has occurred and that the sample contains the target nucleic acid. A detection moiety can be any moiety capable of generating a colorimetric, potentiometric, amperometric, optical (e.g., fluorescent, colorometric, etc.), or piezo-electric signal. A detector nucleic acid, sometimes, is protein-nucleic acid that can generate a calorimetric, potentiometric, amperometric, optical (e.g., fluorescent, colorometric, etc.), or piezo-electric signal upon cleavage of the nucleic acid. Often a calorimetric signal is heat produced after cleavage of the detector nucleic acids. Sometimes, a calorimetric signal is heat absorbed after cleavage of the detector nucleic acids. A potentiometric signal, for example, is electrical potential produced after cleavage of the detector nucleic acids. An amperometric signal can be movement of electrons produced after the cleavage of detector nucleic acid. Often, the signal is an optical signal, such as a colorometric signal or a fluorescence signal. An optical signal is, for example, a light output produced after the cleavage of the detector nucleic acids. Sometimes, an optical signal is a change in light absorbance between before and after the cleavage of detector nucleic acids. Often, a piezo-electric signal is a change in mass between before and after the cleavage of the detector nucleic acid.

[0363] Detecting the presence or absence of a target nucleic acid of interest can involve measuring a signal emitted from a detection moiety present in a reporter, after cleavage of the reporter by an activated programmable nuclease. The signal can be measured using one or more sensors integrated with the device or operatively coupled to the device. Thus, the detecting steps disclosed herein can involve measuring the presence of a target nucleic acid, quantifying how much of the target nucleic acid is present, or, measuring a signal indicating that the target nucleic acid is absent in a sample. In some embodiments, a signal is generated upon cleavage of the detector nucleic acid by the programmable nuclease. In other embodiments, the signal changes upon cleavage of the detector nucleic acid by the programmable nuclease. In other embodiments, a signal can be present in the absence of detector nucleic acid cleavage and disappear upon cleavage of the target nucleic acid by the programmable nuclease. For example, a signal can be produced in a microfluidic device or lateral flow device after contacting a sample with a composition comprising a programmable nuclease.

[0364] In some cases, the signal can comprise a colorimetric signal or a signal visible by eye. In some instances, the signal is fluorescent, electrical, chemical, electrochemical, or magnetic. A signal can be a calorimetric, potentiometric, amperometric, optical (e.g., fluorescent, colorometric, etc.), or piezo-electric signal. In some cases, the detectable signal is a colorimetric signal or a signal visible by eye. In some instances, the detectable signal is fluorescent, electrical, chemical, electrochemical, or magnetic. In some cases, the first detection signal is generated by binding of the detection moiety to the capture molecule in the detection region, where the first detection signal indicates that the sample contained the target nucleic acid. Sometimes the system can detect more than one type of target nucleic acid, wherein the system may comprise more than one type of guide nucleic acid and more than one type of detector nucleic acid. In some cases, the detectable signal is generated directly by the cleavage event. Alternatively, or in combination, the detectable signal is generated indirectly by the signal event. Sometimes the detectable signal is not a fluorescent signal. In some instances, the detectable signal is a colorimetric or color-based signal. In some cases, the detected target nucleic acid is identified based on its spatial location on the detection region of the support medium.

[0365] In some cases, the one or more detectable signals generated after cleavage can produce an index of refraction change or one or more electrochemical changes. In some cases, real-time detection of the Cas reaction can be achieved using fluorescence, electrochemical detection, and/or electrochemiluminescence.

[0366] In some cases, the detectable signals can be detected and analyzed in various ways. For example, the detectable signals can be detected using an imaging device. The imaging device can a digital camera, such a digital camera on a mobile device. The mobile device can have a software program or a mobile application that can capture fluorescence, ultraviolet (UV), infrared (IR), or visible wavelength signals. Any suitable detection or measurement device can be used to detect and/or analyze the colorimetric, fluorescence, amperometric, potentiometric, or electrochemical signals described herein. In some embodiments, the colorimetric, fluorescence, amperometric, potentiometric, or another electrochemical sign can be detected using a measurement device connected to a detection chamber of the device (e.g., a fluorescence measurement device, a spectrophotometer, and/or an oscilloscope).

[0367] In certain aspects of this disclosure, multiplexing refers to parallel sensing of multiple target nucleic acid sequences in one sample by multiple probes.

[0368] FIGS. 7A, 7B, and 7C illustrate two multiplexing embodiments of a CRISPR detection device, as described herein. FIGS. 7A, 7B, and 7C illustrate two multiplexing embodiments of the CRISPR detection device. FIG. 7A illustrates a capillary flow or mobile sample phase embodiment and FIGS. 7B and 7C illustrate a stationary sample phase embodiment. FIG. 7A illustrates, in certain embodiments, a reaction chamber that is in the form of a capillary circuit. Functionalized programmable nuclease probes, e.g., CRISPR probes, can be disposed on the capillary walls, and one or more guide nucleic acids associated with the programmable nuclease probes, e.g., CRISPR probes can be exposed to the sample for binding. Upon binding to a complementary target nucleic acid amplicon (or a target nucleic acid sequence) the programmable nuclease probe or CRISPR probe then cuts and releases at least a portion of a reporter that generates a signal indicating the presence of the particular target nucleic acid amplicon. This identification process is repeated in parallel across multiple programmable nuclease probes or CRISPR probes, where each programmable nuclease or CRISPR probe is configured to detect a particular target sequence, nucleic acid amplicon, set of target sequences, or set of target nucleic acid amplicons. In certain aspects, as seen in FIGS. 7B and 7C, multiplexed detection can also be achieved in a stationary phase, or microarray format. In some embodiments, programmable nuclease probes or CRISPR probes, each designed to detect certain target nucleic acid sequences, are immobilized in known locations. When the remixed sample containing multiple types of target amplicons is exposed to the array of programmable nuclease or CRISPR probes, the specific probe-target pairs will bind and trigger signal events. These signal events can be associated with a particular target nucleic acid amplicon or set of target nucleic acid amplicons either by its location when imaging is used, or by a signal received by a particular sensor when sensors are individually linked to each probe. In some instances, one or more target nucleic acid amplicons can be detected by a programmable nuclease probe. In some instances, the programmable nuclease probe can interact with and/or detect a class of sequences or a class of target nucleic acid amplicons, which can indicate a presence or an existence of a particular organism, disease state, or phenotype present within the sample.

[0369] The devices of the present disclosure can be used to implement for detection of one or more target nucleic acids within the sample. The devices of the present disclosure can comprise one or multiple pumps, valves, reservoirs, and chambers for sample preparation, optional amplification of a target nucleic acid within the sample, mixing with a programmable nuclease, and detection of a detectable signal arising from cleavage of detector nucleic acids by a programmable nuclease.

[0370] Methods consistent with the present disclosure include a multiplexing method of assaying for a plurality of target nucleic acids in a sample. A multiplexing method may comprise contacting the sample to a complex comprising a guide nucleic acid comprising a segment that is reverse complementary to a segment of the target nucleic acid and a programmable nuclease that exhibits sequence independent cleavage upon forming a complex comprising the segment of the guide nucleic acid binding to the segment of the target nucleic acid; and assaying for a signal indicating cleavage of at least some reporters (e.g., protein-nucleic acids) of a population of reporter molecules (e.g., protein-nucleic acids), wherein the signal indicates a presence of the target nucleic acid in the sample and wherein absence of the signal indicates an absence of the target nucleic acid in the sample.

[0371] Multiplexing can comprise spatial multiplexing wherein multiple different target nucleic acids are detected at the same time, but the reactions are spatially separated. In some cases, the multiple target nucleic acids are detected using the same programmable nuclease, but different guide nucleic acids. The multiple target nucleic acids sometimes are detected using the different programmable nucleases. In the case wherein multiple target nucleic acids are detected using the different programmable nucleases, the method involves using a first programmable nuclease, which upon activation (e.g., after binding of a first guide nucleic acid to a first target), cleaves a nucleic acid of a first reporter and using a second programmable nuclease, which upon activation (e.g., after binding of a second guide nucleic acid to a second target), cleaves a nucleic acid of a second reporter.

[0372] Sometimes, multiplexing can be single reaction multiplexing wherein multiple different target acids are detected in a single reaction volume. Often, at least two different programmable nucleases are used in single reaction multiplexing. For example, multiplexing can be enabled by immobilization of multiple categories of detector nucleic acids within a fluidic system, to enable detection of multiple target nucleic acids within a single fluidic system. Multiplexing allows for detection of multiple target nucleic acids in one kit or system. In some cases, the multiple target nucleic acids comprise different target nucleic acids to a virus, a bacterium, or a pathogen responsible for one disease. In some cases, the multiple target nucleic acids comprise different target nucleic acids associated with a cancer or genetic disorder. Multiplexing for one disease, cancer, or genetic disorder increases at least one of sensitivity, specificity, or accuracy of the assay to detect the presence of the disease in the sample. In some cases, the multiple target nucleic acids comprise target nucleic acids directed to different viruses, bacteria, or pathogens responsible for more than one disease. In some cases, multiplexing allows for discrimination between multiple target nucleic acids, such as target nucleic acids that comprise different genotypes of the same bacteria or pathogen responsible for a disease, for example, for a wild-type genotype of a bacteria or pathogen and for genotype of a bacteria or pathogen comprising a mutation, such as a single nucleotide polymorphism (SNP) that can confer resistance to a treatment, such as antibiotic treatment. Multiplexing, thus, allows for multiplexed detection of multiple genomic alleles. For example, multiplexing may comprise method of assaying comprising a single assay for a microorganism species using a first programmable nuclease and an antibiotic resistance pattern in a microorganism using a second programmable nuclease. Sometimes, multiplexing allows for discrimination between multiple target nucleic acids of different HPV strains, for example, HPV16 and HPV18. In some cases, the multiple target nucleic acids comprise target nucleic acids directed to different cancers or genetic disorders. Often, multiplexing allows for discrimination between multiple target nucleic acids, such as target nucleic acids that comprise different genotypes, for example, for a wild-type genotype and for SNP genotype. Multiplexing for multiple diseases, cancers, or genetic disorders provides the capability to test a panel of diseases from a single sample. For example, multiplexing for multiple diseases can be valuable in a broad panel testing of a new patient or in epidemiological surveys. Often multiplexing is used for identifying bacterial pathogens in sepsis or other diseases associated with multiple pathogens.

[0373] Furthermore, signals from multiplexing can be quantified. For example, a method of quantification for a disease panel may comprise assaying for a plurality of unique target nucleic acids in a plurality of aliquots from a sample, assaying for a control nucleic acid control in a second aliquot of the sample, and quantifying a plurality of signals of the plurality of unique target nucleic acids by measuring signals produced by cleavage of detector nucleic acids compared to the signal produced in the second aliquot. In this context, a unique target nucleic acid refers to the sequence of a nucleic acid that has an at least one nucleotide difference from the sequences of the other nucleic acids in the plurality. Multiple copies of each target nucleic acid can be present. For example, a unique target nucleic population can comprise multiple copies of the unique target nucleic acid. Often the plurality of unique target nucleic acids is from a plurality of bacterial pathogens in the sample.

[0374] In some instances, the multiplexed devices, systems, fluidic devices, kits, and methods detect at least 2 different target nucleic acids in a single reaction. In some instances, the multiplexed devices, systems, fluidic devices, kits, and methods detect at least 3 different target nucleic acids in a single reaction. In some instances, the multiplexed devices, systems, fluidic devices, kits, and methods detect at least 4 different target nucleic acids in a single reaction. In some instances, the multiplexed devices, systems, fluidic devices, kits, and methods detect at least 5 different target nucleic acids in a single reaction. In some cases, the multiplexed devices, systems, fluidic devices, kits, and methods detect at least 6, 7, 8, 9, or 10 different target nucleic acids in a single reaction. In some instances, the multiplexed kits detect at least 2 different target nucleic acids in a single kit. In some instances, the multiplexed kits detect at least 3 different target nucleic acids in a single kit. In some instances, the multiplexed kits detect at least 4 different target nucleic acids in a single kit. In some instances, the multiplexed kits detect at least 5 different target nucleic acids in a single kit. In some instances, the multiplexed kits detect at least 6, 7, 8, 9, or 10 different target nucleic acids in a single kit. In some instances, the multiplexed kits detect from 2 to 10, from 3 to 10, from 4 to 10, from 5 to 10, from 6 to 10, from 7 to 10, from 8 to 10, from 9 to 10, from 2 to 9, from 3 to 9, from 4 to 9, from 5 to 9, from 6 to 9, from 7 to 9, from 8 to 9, from 2 to 8, from 3 to 8, from 4 to 8, from 5 to 8, from 6 to 8, from 7 to 8, from 2 to 7, from 3 to 7, from 4 to 7, from 5 to 7, from 6 to 7, from 2 to 6, from 3 to 6, from 4 to 6, from 5 to 6, from 2 to 5, from 3 to 5, from 4 to 5, from 2 to 4, from 3 to 4, or from 2 to 3 different target nucleic acids in a single kit. Multiplexing can be carried out in a single-pot or “one-pot” reaction, where reverse transcription, amplification, in vitro transcription, or any combination thereof, and detection are carried out in a single volume. Multiplexing can be carried out in a “two-pot reaction”, where reverse transcription, amplification, in vitro transcription, or any combination thereof, are carried out in a first volume and detection is carried out in a second volume.

[0375] In some cases, multiplexing can comprise detecting multiple targets with a single probe. Alternatively, multiplexing can comprise detecting multiple targets with multiple probes. The multiple probes can be configured to detect a presence of a particular sequence, target nucleic acid, or a plurality of different target sequences or nucleic acids.

[0376] The devices of the present disclosure can be manufactured from a variety of different materials. Exemplary materials that can be used include plastic polymers, such as poly-methacrylate (PMMA), cyclic olefin polymer (COP), cyclic olefin copolymer (COC), polyethylene (PE), high-density polyethylene (HDPE), polypropylene (PP); glass; and silicon. Features of the device (e.g., chambers, channels, etc.) can be manufactured by various processes. For example, the features can be (1) embossed using injection molding, (2) micro-milled or micro-engraved using computer numerical control (CNC) micromachining or non-contact laser drilling (by means of a CO2 laser source); (3) generated using additive manufacturing, and/or (4) generated using one or more photolithographic or stereolithographic methods.

[0377] In some embodiments, any of the devices of the present disclosure can comprise a sample interface configured to receive a sample that may comprise at least one gene of interest. The device can further comprise a channel in fluid communication with the sample interface and a detection chamber. In some cases, the channel may comprise one or more movable mechanisms to separate the sample into a plurality of droplets. As used herein, a droplet can refer to a volumetric portion of the sample, a partitioned sub-sample of the sample, and/or an aliquot of the sample. In some cases, the detection chamber is configured to receive and contact the plurality of droplets with at least one programmable nuclease probe disposed on a surface of said detection chamber. The at least one programmable nuclease probe can comprise a guide nucleic acid complexed with a programmable nuclease. In some cases, the programmable nuclease probe may comprise a CRISPR/Cas enzyme. In some cases, the guide nucleic acid may comprise a guide RNA. In some embodiments, the device may comprise a plurality of programmable nuclease probes comprising different guide RNAs.

[0378] The device can further comprise a plurality of sensors that determine a presence of said at least one gene of interest by detecting a signal produced upon cleavage of a target nucleic acid region in said at least one gene of interest by said at least one programmable nuclease probe. The cleavage of the target nucleic acid region can occur after a complementary binding of said target nucleic acid region to said guide nucleic acid of said at least one programmable nuclease probe.

[0379] As described elsewhere herein, the one or more movable mechanisms can comprise one or more valves configured to restrict flow through one or more sections of the channel. The one or more movable mechanisms can comprise a plunger or a bristle that is configured to restrict flow through one or more sections of the channel. The one or more movable mechanisms can be operatively coupled to a power source that is integrated with or insertable into the device. The power source can comprise a battery.

[0380] In some cases, any of the devices described herein may comprise a physical filter to filter one or more particles from the sample that do not comprise the one or more targets (e.g., a gene of interest). In some cases, the device may comprise a sample preparation chamber. The sample preparation chamber can comprise a lysing agent. The sample preparation chamber can comprise a heating unit configured for heat inactivation. The sample preparation chamber can comprise one or more reagents for nucleic acid purification.

[0381] In some cases, the channel between the sample interface and the detection chamber may comprise a plurality of heating elements and a plurality of heat sinks for amplifying the at least one gene of interest or a portion thereof. The plurality of heating elements and the plurality of heat sinks can be configured to perform one or more thermocycling operations on the sample or at least a portion of the sample (e.g., the plurality of droplets).

[0382] As described elsewhere herein, the signal produced upon cleavage of a target nucleic acid can be associated with a physical, chemical, or electrochemical change or reaction. The signal can comprise an optical signal, a fluorescent or colorimetric signal, a potentiometric or amperometric signal, and/or a piezo-electric signal. In some cases, the signal is associated with a change in an index of refraction of a solid or gel volume in which the at least one programmable nuclease probe is disposed.

[0383] In some embodiments, the device may comprise a sample interface configured to receive a sample that may comprise one or more genomic targets of interest. In some cases, the one or more genomic targets of interest comprise a sequence of nucleic acids comprising the nucleic acid.

[0384] The device can further comprise one or more channels comprising one or more movable mechanisms to separate the sample into partitioned samples. The one or more channels can be in fluid communication with the sample interface and a reaction chamber that is configured to receive and contact the partitioned samples with an enzyme, reagent, or programmable detection agent that is configured to cleave a nucleic acid of said one or more genomic targets of interest.

[0385] The device can further comprise a plurality of sensors for determining a presence of the one or more genomic targets of interest by detecting one or more reporters released by said cleavage of said nucleic acid. The programmable detection agent can be a CRISPR/Cas enzyme. In some cases, the reporter may comprise a nucleic acid and a detection moiety. In some cases, the reporter may comprise at least one ribonucleotide or at least one deoxyribonucleotide. In some cases, the reporter may comprise a DNA nucleic acid or an RNA nucleic acid. The reported molecule can be immobilized on a surface of the detection chamber (i.e., a movement of the reporter can be physically or chemically constrained).

[0386] In some cases, the one or more movable mechanisms comprise a plurality of valves configured to restrict flow in a first direction through the one or more channels towards the sample interface. The plurality of valves can be configured to selectively permit flow in a second direction through the one or more channels towards the reaction chamber. A first valve and a second valve of the plurality of valves can be configured to physically, fluidically, or thermally isolate a first portion of the sample from a second portion of the sample when the first valve and the second valve are in a closed state.

[0387] The one or more channels can comprise a plurality of heating elements and a plurality of heat sinks to perform thermocycling on the partitioned samples. A first heating element of the plurality of heating elements and a first heat sink of the plurality of heat sinks can be positioned between a first movable mechanism and a second movable mechanism of the one or more movable mechanisms.

[0388] In any of the embodiments described herein, the device can further comprise a telemedicine unit configured to provide one or more detection results to a computing unit that is remote from the device. In some embodiments, the telemedicine unit provides one or more detection results to a computing unit that is remote to the device through a cloud-based connection. In some embodiments, the telemedicine unit is HIPAA compliant. In some embodiments, the telemedicine unit transmits encrypted data. The computing unit can comprise a mobile device or a computer. The one or more detection results can indicate a presence or an absence of a target nucleic acid of interest in the sample.

[0389] In another aspect, the present disclosure provides a method for target detection. The method can comprise contacting a sample with the device of any of the preceding claims and detecting a presence or an absence of one or more genes of interest in said sample. In some cases, the method can comprise generating one or more detection results indicating the presence or the absence of the one or more genes of interest in the sample. In some cases, the method can comprise transmitting the one or more detection results to a remote computing unit. The remote computing unit can comprise, for example, a mobile device.

[0390] In another aspect, the present disclosure provides a method for target detection. The method can comprise providing a sample comprising at least one gene of interest. The method can comprise separating the sample into a plurality of sub-samples using one or more movable mechanisms described herein. The method can comprise receiving the plurality of sub-samples in a detection chamber and contacting the plurality of sub-samples with at least one programmable nuclease probe disposed on a surface of said detection chamber. The at least one programmable nuclease probe can comprise a guide nucleic acid complexed with a programmable nuclease. In some cases, the method can comprise contacting the plurality of sub-samples with a plurality of programmable nuclease probes comprising different guide RNAs. The method can comprise using a plurality of sensors to determine a presence or an absence of said at least one gene of interest by detecting a signal produced upon cleavage of a target nucleic acid region in said at least one gene of interest by said at least one programmable nuclease probe.

[0391] In some cases, the method can further comprise amplifying the at least one gene of interest after separating the sample into a plurality of sub-samples. In some cases, the method can further comprise amplifying the at least one gene of interest before mixing the plurality of sub-samples in the detection chamber. Amplifying the at least one gene of interest can comprise using a plurality of heating elements and a plurality of heat sinks to perform thermocycling on the plurality of sub-samples.

[0392] In some cases, the method can comprise using a physical filter to filter one or more particles from the sample that do not comprise the one or more target genes of interest. In some cases, the method can comprise lysing the sample before detecting the one or more target genes of interest. In some cases, the method can comprise performing heat inactivation on the sample. In some cases, the method can comprise performing enzyme (e.g., PK) inactivation on the sample. In some cases, the method can comprise performing nucleic acid purification on the sample.

[0393] In some cases, the detection devices described herein can be configured to implement process control procedures to ensure that the sample preparation, target amplification, and target detection processes are performed accurately and as intended.

### Disposable Fluidic Workflow

[0394] Described herein are various embodiments, for point of need (PON) programmable nuclease-based devices. In some embodiments, the PON device is configured for a 5-plex respiratory panel as shown in FIG. 8. FIG. 8 shows an exemplary assay design for a PON 5-plex panel comprising pooled CRISPR-Cas complexes in discrete regions for viral detection. The discrete regions are for detection of: (1) SARS-CoV-2, (2) Flu A, (3) Flu B, (4) Pan-CoV, and (5) Endogenous human control. The (1) SARS-CoV-2 region may comprise gRNA for detecting N-gene targets and E-gene targets, the (2) Flu A region may comprise gRNA for detecting H1N1 targets, H3N2 targets, and H1N1 pdm2009 targets, the (3) Flu B region may comprise gRNA for detecting Yamagata targets and Victoria targets, the (4) Pan-CoV region may comprise gRNA for detecting HCoV-OC43 targets, HCoV-NL63 targets, HCoV-229E targets, and HCoV-HKU1 targets, and the (5) Endogenous human control region may comprise gRNA for human rpp30 targets. Each region can comprise pooled gRNA. For example, the gRNAs for the Flu A region bind to target sites that are 98% conserved among H1N1, H3N2, and H1N1 pdm2009, such as Matrix Protein 1 (MP), Nonstructural Protein 1 (NS), Neuraminidase (NA), Nucleoprotein (NP), Hemagglutinin (HA), PB1, Polymerase Acidic Protein (PA), and Polymerase Basic Protein 2 (PB2). Detected signal from each region can indicate the detection of a target within that region. In some embodiments, PON programmable nuclease-based devices are disposable, as shown in FIG. 9.

[0395] Described herein are various Point-of-need (PON) diagnostics that can rapidly identify causes of ailments on location where needed by patients. In some embodiments, disposable PON devices can be manufactured and delivered to the user in a sterile condition to help fill this need. However, in some embodiments, transferring assays from the lab to a point-of-need device can be a challenge. In some embodiments, integrating a fluidic system capable of delivering rapid, reliable, and easy to interpret results while still being disposable is especially challenging.

[0396] Disclosed herein are various embodiments of methods, devices, and compositions for a disposable fluidic workflow. In some embodiments, the workflow method may comprise: (1) sample collection from the patient and delivery to the device, (2) lysis, (3) amplification, and (4) detection/readout. In some embodiments, any of the disposable fluidic devices described herein, may comprise an exterior housing and an interior control printed circuit board (PCB) on which to mount sub-components. In some embodiments, such subcomponents may comprise a swab to collect a sample from patient, a mechanism for extracting sample from the swab (e.g., a scraper), fluidics configured to move the sample within the device, one or more sample chambers, one or more reagent storage bags or chambers, amplification mechanisms, detectors, valves and heating elements. In some embodiments, described herein, valves may be rotary valves capable of diverting sample to and from one chamber or channel to multiple other chambers or channels.

[0397] FIG. 10A illustrates an example of a consumable exterior housing. FIG. 10B illustrates an example of components mounted on a printed circuit board (PCB) 1007 and housed within the consumable device housing of FIG. 10A. In some embodiments, a swab cap 1001 may be configured (e.g., rotated, depressed, etc.) to allow user to activate the device. In some embodiments, reagent storage bags (or chambers, etc.) 1002 may be mounted vertically on the PCB 1007. In some embodiments, a motor 1003 to drive the valve, seen in FIG. 11D, may be integrated onto the PCB 1007. In some embodiments, heat traces 1004 may be integrated onto the PCB 1007 to facilitate heating of the sample or a portion thereof. In some embodiments, a light emitting diode (LED) 1005 for excitation of a reporter (e.g., one or more fluorescent labels) may be integrated onto the PCB. In some embodiments, a start button may be activated by pushing on the swab cap 1006. FIG. 10C illustrates an example swab housing, containing a scraper configured to facilitate removal of a sample from the swab 1008. In some embodiments, the sample interface may comprise a scraper. FIG. 9 shows an embodiment of a device comprising a scraper that agitates a swab carrying the sample when the swab is inserted into the inside disposable. FIG. 10C shows another embodiment of a device comprising a scraper (1008). Those skilled in the art will recognize that the scraper may comprise a variety of forms, shapes, and sizes while retaining its function of agitating an input sample. In some embodiments, the scraper facilitates the transfer of sample from the swab to the device.

[0398] FIGS. 11A, 11B, 11C, 11D further illustrate various example components of a consumable, as described herein. FIG. 11A illustrates an example of photodiodes for emission detection 1101, expansion chamber bags 1102, encoder PCB 1103, and a syringe pump, which may be disposed in a layer on top of the PCB. In some embodiments, the syringe pump may be driven by a motor 1004. In other embodiments, the syringe pump is driven by a shape memory alloy (SMA) (e.g., a compressed spring) for mass production. FIG. 11B illustrates an exemplary expansion bag 1102. FIG. 11C illustrates an exemplary injection molded bag core of the expansion bag 1102, where a filter (not shown) can be heat sealed on a proximal end thereof 1105. In some embodiments, an O-Ring seal may be made with the injection molded bag core 1106 at a distal end thereof to facilitate coupling of the expansion bag (1102) to the device during manufacture. In other embodiments, an overmold component 1106, or soft polymer such as TPE, may be integrated with the injection molded bag core for mass production. FIG. 11D illustrates an embodiment of a rotatory valve overmold configured to regulate fluid flow within the device as described herein.

[0399] FIG. 12 illustrates various valve position examples of the consumable device in use during the workflow method as follows: extract lysis (1201); transfer lysis swab to extract sample (1202); move lysis to heat zone (Z1) (1203); move lysis to beads for binding (1204); move lysis to waste (1205); extract elution (1206); move elution to beads (1207) move elution to MM (1208); move to PCR cycling (1209); move to dilution (1210); move to DETECTR (1211). FIG. 12 additionally illustrates an embodiment of the consumable with heat zones (Z) for lysis heating at 95 C (Z1); PCR cycling at 95 C (Z2); PCR cycling at 65 C (Z3) and DETECTR heating at 37 C (Z4). In some embodiments, a sample may be exposed to multiple heat zones within one chamber or channel, thus enabling constant sample fluid flow.

### Electrochemical DETECTR Reaction

[0400] The present disclosure provides various devices, systems, fluidic devices, and kits for rapid tests, which may quickly assess whether a target nucleic acid is present in a sample by using a programmable nuclease that can interact with functionalized surfaces of the fluidic systems to generate a detectable signal. For example, disclosed herein are particular microfluidic devices, lateral flow devices, sample preparation devices, and compositions (e.g., programmable nucleases, guide RNAs, reagents for in vitro transcription, amplification, reverse transcription, and reporters, or any combination thereof) for use in said devices that are particularly well suited to carry out a highly efficient, rapid, and accurate reactions for detecting the presence of a target nucleic acid (e.g., a DETECTR reaction). The systems and programmable nucleases disclosed herein can be used as a companion diagnostic with any of the diseases disclosed herein (e.g., RSV, sepsis, flu, COVID-19), or can be used in reagent kits, point-of-care diagnostics, or over-the-counter diagnostics. The systems may be used as a point of care diagnostic or as a lab test for detection of a target nucleic acid and, thereby, detection of a condition, for example, in a subject from which the sample was taken. The systems may be used in various sites or locations, such as in laboratories, in hospitals, in physician offices/laboratories (POLs), in clinics, at remotes sites, or at home. Sometimes, the present disclosure provides various devices, systems, fluidic devices, and kits for consumer genetic use or for over-the-counter use.

### Guide Nucleic Acids

[0401] Guide nucleic acids are compatible for use in the devices described herein (e.g., pneumatic valve devices, sliding valve devices, rotating valve devices, and lateral flow devices) and may be used in conjunction with compositions disclosed herein (e.g., programmable nucleases, reagents for in vitro transcription, reagents for amplification, reagents for reverse transcription, and reporters, or any combination thereof) to carry out highly efficient, rapid, and accurate reactions for detecting whether a target nucleic acid is present in a sample (e.g., DETECTR reactions). The guide nucleic acid binds to the single stranded target nucleic acid comprising a portion of a nucleic acid from a virus or a bacterium or other agents responsible for a disease as described herein. The guide nucleic acid can bind to the single stranded target nucleic acid comprising a portion of a nucleic acid from a bacterium or other agents responsible for a disease as described herein and further comprising a mutation, such as a single nucleotide polymorphism (SNP), which can confer resistance to a treatment, such as antibiotic treatment. The guide nucleic acid binds to the single stranded target nucleic acid comprising a portion of a nucleic acid from a cancer gene or gene associated with a genetic disorder as described herein. The guide nucleic acid is complementary to the target nucleic acid. Often the guide nucleic acid binds specifically to the target nucleic acid. The target nucleic acid may be a RNA, DNA, or synthetic nucleic acids. A guide nucleic acid can comprise a sequence that is reverse complementary to the sequence of a target nucleic acid. A guide nucleic acid can be a crRNA. Sometimes, a guide nucleic acid may comprise a crRNA and tracrRNA. The guide nucleic acid can bind specifically to the target nucleic acid. In some cases, the guide nucleic acid is not naturally occurring and made by artificial combination of otherwise separate segments of sequence. Often, the artificial combination is performed by chemical synthesis, by genetic engineering techniques, or by the artificial manipulation of isolated segments of nucleic acids. The target nucleic acid can be designed and made to provide desired functions. In some cases, the targeting region of a guide nucleic acid is 20 nucleotides in length. The targeting region of the guide nucleic acid may have a length of at least 10, 11, 12, 13, 14, 15, 16, 17, 18, 19, 20, 21, 22, 23, 24, 25, 26, 27, 28, 29, or 30 nucleotides in length. In some instances, the targeting region of the guide nucleic acid is 10, 11, 12, 13, 14, 15, 16, 17, 18, 19, 20, 21, 22, 23, 24, 25, 26, 27, 28, 29, or 30 nucleotides in length. In some cases, the targeting region of a guide nucleic acid has a length from exactly or about 12 nucleotides (nt) to about 80 nt, from about 12 nt to about 50 nt, from about 12 nt to about 45 nt, from about 12 nt to about 40 nt, from about 12 nt to about 35 nt, from about 12 nt to about 30 nt, from about 12 nt to about 25 nt, from about 12 nt to about 20 nt, from about 12 nt to about 19 nt, from about 19 nt to about 20 nt, from about 19 nt to about 25 nt, from about 19 nt to about 30 nt, from about 19 nt to about 35 nt, from about 19 nt to about 40 nt, from about 19 nt to about 45 nt, from about 19 nt to about 50 nt, from about 19 nt to about 60 nt, from about 20 nt to about 25 nt, from about 20 nt to about 30 nt, from about 20 nt to about 35 nt, from about 20 nt to about 40 nt, from about 20 nt to about 45 nt, from about 20 nt to about 50 nt, or from about 20 nt to about 60 nt. In some cases, the targeting region of a guide nucleic acid has a length of from about 10 nt to about 60 nt, from about 20 nt to about 50 nt, or from about 30 nt to about 40 nt. In some cases, the targeting region of a guide nucleic acid has a length of from 15 nt to 55 nt, from 25 nt to 55 nt, from 35 nt to 55 nt, from 45 nt to 55 nt, from 15 nt to 45 nt, from 25 nt to 45 nt, from 35 nt to 45 nt, from 15 nt to 35 nt, from 25 nt to 35 nt, or from 15 nt to 25 nt. It is understood that the sequence of a polynucleotide need not be 100% complementary to that of its target nucleic acid to be specifically hybridizable or hybridizable or bind specifically. The guide nucleic acid can have a sequence comprising at least one uracil in a region from nucleic acid residue 5 to 20 that is reverse complementary to a modification variable region in the target nucleic acid. The guide nucleic acid, in some cases, has a sequence comprising at least one uracil in a region from nucleic acid residue 5 to 9, 10 to 14, or 15 to 20 that is reverse complementary to a modification variable region in the target nucleic acid. The guide nucleic acid can have a sequence comprising at least one uracil in a region from nucleic acid residue 5 to 20 that is reverse complementary to a methylation variable region in the target nucleic acid. The guide nucleic acid, in some cases, has a sequence comprising at least one uracil in a region from nucleic acid residue 5 to 9, 10 to 14, or 15 to 20 that is reverse complementary to a methylation variable region in the target nucleic acid.

[0402] The guide nucleic acid can be selected from a group of guide nucleic acids that have been tiled against the nucleic acid of a strain of an infection or genomic locus of interest. The guide nucleic acid can be selected from a group of guide nucleic acids that have been tiled against the nucleic acid of a strain of HPV 16 or HPV 18. Often, guide nucleic acids that are tiled against the nucleic acid of a strain of an infection or genomic locus of interest can be pooled for use in a method described herein. Often, these guide nucleic acids are pooled for detecting a target nucleic acid in a single assay. The pooling of guide nucleic acids that are tiled against a single target nucleic acid can enhance the detection of the target nucleic using the methods described herein. The pooling of guide nucleic acids that are tiled against a single target nucleic acid can ensure broad coverage of the target nucleic acid within a single reaction using the methods described herein. The tiling, for example, is sequential along the target nucleic acid. Sometimes, the tiling is overlapping along the target nucleic acid. In some instances, the tiling may comprise gaps between the tiled guide nucleic acids along the target nucleic acid. In some instances, the tiling of the guide nucleic acids is non-sequential. Often, a method for detecting a target nucleic acid may comprise contacting a target nucleic acid to a pool of guide nucleic acids and a programmable nuclease, wherein a guide nucleic acid of the pool of guide nucleic acids has a sequence selected from a group of tiled guide nucleic acid that is reverse complementary to a sequence of a target nucleic acid; and assaying for a signal produce by cleavage of at least some detector nucleic acids of a population of detector nucleic acids. Pooling of guide nucleic acids can ensure broad spectrum identification, or broad coverage, of a target species within a single reaction. This can be particularly helpful in diseases or indications, like sepsis, that may be caused by multiple organisms. Exemplary guide nucleic acids are listed in Table 2. In Table 2, references to a “Cas12 Variant” refer to a Cas12 variant having the sequence of SEQ ID NO: 17, and references to “CasM.26” refer to a Cas13 variant having the sequence of SEQ ID NO: 21.

TABLE 2
Exemplary guide nucleic acids

| | | SEQ | |
|---|---|---|---|
| | | ID | |
| Name | Description | NO: | Sequence |
| R002 | CasM.26 control crRNA | 130 | GGCCACCCCAAAAAUGAAGGGGACUAAA |
| | | | ACACAAACAUGAUCUGGGUCAUC |
| R6052 | CasM.26 crRNA targeting MS2 | 131 | GCCACCCCAAAAAUGAAGGGGACUAAAA |
| | | | CACGGAGUUUGCUGCGAUUGCU |
| R439 | RNA target sequence for R002 | 132 | GCCAACCGCGAGAAGAUGACCCAGAUCA |
| | | | UGUUUGAGACCUUCAACACCCC |
| | CasM.26 crRNA targeting | 133 | GCCACCCCAAAAAUGAAGGGGACUAAAA |
| | MERS-CoV | | CAGCGACACUAAAACAUGAUGU |
| | CasM.26 crRNA targeting | 134 | GCCACCCCAAAAAUGAAGGGGACUAAAA |
| | MERS-CoV | | CAGGACAAAGGGUAACAUAGUU |
| | CasM.26 crRNA targeting | 135 | GCCACCCCAAAAAUGAAGGGGACUAAAA |
| | MERS-CoV | | CAGCAUUUACAAUAGAACCCCG |
| | CasM.26 crRNA targeting | 136 | GCCACCCCAAAAAUGAAGGGGACUAAAA |
| | human metapneumovirus | | CAGCUCCAUGCAAAUAUGAAGU |
| | CasM.26 crRNA targeting | 137 | GCCACCCCAAAAAUGAAGGGGACUAAAA |
| | human metapneumovirus | | CAACUCUGUAUGCUGCAUCACA |
| | CasM.26 crRNA targeting | 138 | GCCACCCCAAAAAUGAAGGGGACUAAAA |
| | human metapneumovirus | | CAUAACAUGGAAAGAUGUGAUG |
| | CasM.26 crRNA targeting | 139 | GCCACCCCAAAAAUGAAGGGGACUAAAA |
| | human parainfluenza 1 | | CAAUCUGGCUACUGAUUGCAAC |
| | CasM.26 crRNA targeting | 140 | GCCACCCCAAAAAUGAAGGGGACUAAAA |
| | human parainfluenza 1 | | CACAUGACAGUAUCCUCCGUGA |
| | CasM.26 crRNA targeting | 141 | GCCACCCCAAAAAUGAAGGGGACUAAAA |
| | human parainfluenza 1 | | CACAUCUGGCUACUGAUUGCAA |
| | CasM.26 crRNA targeting | 142 | GCCACCCCAAAAAUGAAGGGGACUAAAA |
| | human parainfluenza 2 | | CAAGCAGUCCUCACGCUAUUUU |
| | CasM.26 crRNA targeting | 143 | GCCACCCCAAAAAUGAAGGGGACUAAAA |
| | human parainfluenza 2 | | CAGGGAUAAUACAACAAUCUGC |
| | CasM.26 crRNA targeting | 144 | GCCACCCCAAAAAUGAAGGGGACUAAAA |
| | human parainfluenza 2 | | CACAAGUCAUGAUGGGUGCAGA |
| | CasM.26 crRNA targeting | 145 | GCCACCCCAAAAAUGAAGGGGACUAAAA |
| | human parainfluenza 4 | | CAAUGAAUCUAGGAACGGUACC |
| | CasM.26 crRNA targeting | 146 | GCCACCCCAAAAAUGAAGGGGACUAAAA |
| | human parainfluenza 4 | | CAAAUAGUACUUUUCGACGUGA |
| | CasM.26 crRNA targeting | 147 | GCCACCCCAAAAAUGAAGGGGACUAAAA |
| | human parainfluenza 4 | | CAAGAAUGUGGGGUCAUCCCAC |
| | CasM.26 crRNA targeting | 148 | GCCACCCCAAAAAUGAAGGGGACUAAAA |
| | hCoV-OC43 | | CAAGUAGCGCUAACUAGGGCUC |
| | CasM.26 crRNA targeting | 149 | GCCACCCCAAAAAUGAAGGGGACUAAAA |
| | hCoV-OC43 | | CAACCGCUUGUUAUAGCGGCAA |
| | CasM.26 crRNA targeting | 150 | GCCACCCCAAAAAUGAAGGGGACUAAAA |
| | hCoV-OC43 | | CAUGGCUGAACAGUGUAACCGU |
| | CasM.26 crRNA targeting | 151 | GCCACCCCAAAAAUGAAGGGGACUAAAA |
| | human parainfluenza 3 | | CAAUUGGUGAUCCAUCAGUUGC |
| | CasM.26 crRNA targeting | 152 | GCCACCCCAAAAAUGAAGGGGACUAAAA |
| | human parainfluenza 3 | | CAAAUUCAUACUCAGCACCGAC |
| | CasM.26 crRNA targeting | 153 | GCCACCCCAAAAAUGAAGGGGACUAAAA |
| | human parainfluenza 3 | | CAAACUUAGGAGCAAAGCGUGC |
| | CasM.26 crRNA targeting | 154 | GCCACCCCAAAAAUGAAGGGGACUAAAA |
| | RSV-A | | CAUUGCGUACAGUAGUGGAACU |
| | CasM.26 crRNA targeting | 155 | GCCACCCCAAAAAUGAAGGGGACUAAAA |
| | RSV-A | | CAAUCCAUUGGACCUCUCAAGA |
| | CasM.26 crRNA targeting | 156 | GCCACCCCAAAAAUGAAGGGGACUAAAA |
| | RSV-A | | CAAUAUGUCACGAAGGAAUCCU |
| | CasM.26 crRNA targeting | 157 | GCCACCCCAAAAAUGAAGGGGACUAAAA |
| | RSV-B | | CAAUAUUAGGAAUGCUCCAUAC |
| | CasM.26 crRNA targeting | 158 | GCCACCCCAAAAAUGAAGGGGACUAAAA |
| | RSV-B | | CAUAGACUGGGUAUAUGCAUCC |
| | CasM.26 crRNA targeting | 159 | GCCACCCCAAAAAUGAAGGGGACUAAAA |
| | RSV-B | | CAAAAGUACAGUCCAAUCGAGU |
| | CasM.26 crRNA targeting | 160 | GCCACCCCAAAAAUGAAGGGGACUAAAA |
| | hCoV-229E | | CAUACUCGUACGUAGAAAACCC |
| | CasM.26 crRNA targeting | 161 | GCCACCCCAAAAAUGAAGGGGACUAAAA |
| | hCoV-229E | | CAUACGGUUUAACGGUGGUUUG |
| | CasM.26 crRNA targeting | 162 | GCCACCCCAAAAAUGAAGGGGACUAAAA |
| | hCoV-229E | | CAGCCAUAGCACGUUUAUCAUA |
| | CasM.26 crRNA targeting | 163 | GCCACCCCAAAAAUGAAGGGGACUAAAA |
| | hCoV-HKU1 | | CACGUUGCGGACCUUUAAUCAU |
| | CasM.26 crRNA targeting | 164 | GCCACCCCAAAAAUGAAGGGGACUAAAA |
| | hCoV-HKU1 | | CAUACCGGACUUUACGGCUGUU |
| | CasM.26 crRNA targeting | 165 | GCCACCCCAAAAAUGAAGGGGACUAAAA |
| | hCoV-HKU1 | | CACGUCGUCAUCUAUACGCUGA |
| | CasM.26 crRNA targeting | 166 | GCCACCCCAAAAAUGAAGGGGACUAAAA |
| | hCoV-NL63 | | CACGUCUAAAACGUUUGGCACA |
| | CasM.26 crRNA targeting | 167 | GCCACCCCAAAAAUGAAGGGGACUAAAA |
| | hCoV-NL63 | | CAAGAACCCCUUGCUCGUUUAA |
| | CasM.26 crRNA targeting | 168 | GCCACCCCAAAAAUGAAGGGGACUAAAA |
| | hCoV-NL63 | | CAGAACACGCUUCCAACGAGGU |
| | CasM.26 crRNA targeting | 169 | GCCACCCCAAAAAUGAAGGGGACUAAAA |
| | Gammacoronavirus | | CACCCCGUACCCGUUUAAAUAA |
| | CasM.26 crRNA targeting | 170 | GCCACCCCAAAAAUGAAGGGGACUAAAA |
| | Gammacoronavirus | | CACCCGUACCCGUUUAAAUAAU |
| | CasM.26 crRNA targeting | 171 | GCCACCCCAAAAAUGAAGGGGACUAAAA |
| | Gammacoronavirus | | CAGUACCCGUUUAAAUAAUUCU |
| | CasM.26 crRNA targeting | 172 | GCCACCCCAAAAAUGAAGGGGACUAAAA |
| | Deltacoronavirus | | CAACAUUACAAUUCCAAAACAU |
| | CasM.26 crRNA targeting | 173 | GCCACCCCAAAAAUGAAGGGGACUAAAA |
| | Deltacoronavirus | | CAUCAACACUACAAAUGUAGUU |
| | CasM.26 crRNA targeting | 174 | GCCACCCCAAAAAUGAAGGGGACUAAAA |
| | Deltacoronavirus | | CAGCUUCACCAUCUUGCAUAUA |
| | CasM.26 crRNA targeting | 175 | GCCACCCCAAAAAUGAAGGGGACUAAAA |
| | Alphacoronavirus | | CAUCUAGUCGAGCUGCACUAGA |
| | CasM.26 crRNA targeting | 176 | GCCACCCCAAAAAUGAAGGGGACUAAAA |
| | Alphacoronavirus | | CAUCUAGUCGAGCUCCACUAGA |
| | CasM.26 crRNA targeting | 177 | GCCACCCCAAAAAUGAAGGGGACUAAAA |
| | Alphacoronavirus | | CAUCUAGUCGAGCGGCACUAGA |
| | CasM.26 crRNA targeting | 178 | GCCACCCCAAAAAUGAAGGGGACUAAAA |
| | Rhinovirus C | | CAACACGGACACCCAAAGUAGU |
| | CasM.26 crRNA targeting | 179 | GCCACCCCAAAAAUGAAGGGGACUAAAA |
| | Rhinovirus C | | CAACACGGUUACCCAAAGUAGU |
| | CasM.26 crRNA targeting | 180 | GCCACCCCAAAAAUGAAGGGGACUAAAA |
| | Rhinovirus C | | CACGGCCCCUGAAUGCGGCUAA |
| | CasM.26 crRNA targeting | 181 | GCCACCCCAAAAAUGAAGGGGACUAAAA |
| | Rhinovirus C | | CACGGCCCCUGAAUGUGGCUAA |
| | CasM.26 crRNA targeting | 182 | GCCACCCCAAAAAUGAAGGGGACUAAAA |
| | Rhinovirus C | | CACGGUCCCUGAAUGUGGCUAA |
| | CasM.26 crRNA targeting | 183 | GCCACCCCAAAAAUGAAGGGGACUAAAA |
| | Betacoronavirus | | CAUUCUUAGCACUAAUAGCAUA |
| | CasM.26 crRNA targeting | 184 | GCCACCCCAAAAAUGAAGGGGACUAAAA |
| | Betacoronavirus | | CAUUUUUAGCACUAAUGGCAUA |
| | CasM.26 crRNA targeting | 185 | GCCACCCCAAAAAUGAAGGGGACUAAAA |
| | Betacoronavirus | | CAUUCUUUGCACUAAUGGCAUA |
| | CasM.26 crRNA targeting | 186 | GCCACCCCAAAAAUGAAGGGGACUAAAA |
| | Betacoronavirus | | CAUUCUUAGCACUGAUAGCAUA |
| R504 | CasM.26 crRNA targeting | 187 | GCCACCCCAAAAAUGAAGGGGACUAAAA |
| | Influenza A | | CAAGUGAGCGAGGACUGCAGCG |
| R474 | CasM.26 crRNA targeting | 188 | GCCACCCCAAAAAUGAAGGGGACUAAAA |
| | Influenza A | | CACUUCUAACCGAGGUCGAAAC |
| R521 | CasM.26 crRNA targeting | 189 | GCCACCCCAAAAAUGAAGGGGACUAAAA |
| | Influenza A | | CAACAGCCAGACAGCGACCAAA |
| R534 | CasM.26 crRNA targeting | 190 | GCCACCCCAAAAAUGAAGGGGACUAAAA |
| | Influenza B | | CAGAAAAUGUUUCAAAUAUCAG |
| R567 | CasM.26 crRNA targeting | 191 | GCCACCCCAAAAAUGAAGGGGACUAAAA |
| | Influenza B | | CAACAUUGUAUGAAAUGAAGGA |
| R545 | CasM.26 crRNA targeting | 192 | GCCACCCCAAAAAUGAAGGGGACUAAAA |
| | Influenza B | | CAUGGGAGGGACACAGCAGAGG |
| | CasM.26 crRNA targeting | 193 | GCCACCCCAAAAAUGAAGGGGACUAAAA |
| | SARS-CoV-2 | | CAGUCUGUGCCAGCAUGAACUC |
| | CasM.26 crRNA targeting | 194 | GCCACCCCAAAAAUGAAGGGGACUAAAA |
| | SARS-CoV-2 | | CAGACUUUAGAUCGGCGCCGUA |
| | CasM.26 crRNA targeting | 195 | GCCACCCCAAAAAUGAAGGGGACUAAAA |
| | SARS-CoV-2 | | CAUAGACAACAGGUGCGCUCAG |
| | CasM.26 crRNA targeting | 196 | GCCACCCCAAAAAUGAAGGGGACUAAAA |
| | SARS-CoV-1 | | CAUAUCAACGGGCGUCUCGAGU |
| | CasM.26 crRNA targeting | 197 | GCCACCCCAAAAAUGAAGGGGACUAAAA |
| | SARS-CoV-1 | | CAUGCAUCAAGUGUGCGCGCAA |
| | CasM.26 crRNA targeting | 198 | GCCACCCCAAAAAUGAAGGGGACUAAAA |
| | SARS-CoV-1 | | CAGAGUGAUCGCAACUUUGCGC |
| | CasM.26 crRNA targeting | 199 | GCCACCCCAAAAAUGAAGGGGACUAAAA |
| | Sarbecovirus subgenus | | CAAGUACGCACACAAUCGAAGC |
| | CasM.26 crRNA targeting | 200 | GCCACCCCAAAAAUGAAGGGGACUAAAA |
| | Sarbecovirus subgenus | | CAACAAUCGAAGCGCAGUAAGG |
| | CasM.26 crRNA targeting | 201 | GCCACCCCAAAAAUGAAGGGGACUAAAA |
| | Sarbecovirus subgenus | | CAGCAGUACGCACACAAUCGAA |
| | CasM.26 crRNA targeting | 202 | GCCACCCCAAAAAUGAAGGGGACUAAAA |
| | SARS-related viruses | | CAUUCGGUCACACCCGGACGAA |
| | CasM.26 crRNA targeting | 203 | GCCACCCCAAAAAUGAAGGGGACUAAAA |
| | SARS-related viruses | | CACAACGGUAAUAGUACCGUUG |
| | CasM.26 crRNA targeting | 204 | GCCACCCCAAAAAUGAAGGGGACUAAAA |
| | SARS-related viruses | | CAUACCUUUCGGUCACACCCGG |
| R6052 | CasM.26 crRNA targeting MS2 | 131 | GCCACCCCAAAAAUGAAGGGGACUAAAA |
| | | | CACGGAGUUUGCUGCGAUUGCU |
| R6042 | CasM.26 crRNA targeting MS2 | 205 | GCCACCCCAAAAAUGAAGGGGACUAAAA |
| | | | CAGGAGACCUUGCAUUGCCUUA |
| | CasM.26 crRNA targeting | 206 | GCCACCCCAAAAAUGAAGGGGACUAAAA |
| | Influenza B-Victoria V1 | | CAAGAUCAAUAGUCGCUUCAAA |
| | CasM.26 crRNA targeting | 207 | GCCACCCCAAAAAUGAAGGGGACUAAAA |
| | Influenza B-Victoria V1 | | CAUUGUAACUUUCGAAUUCAGU |
| | CasM.26 crRNA targeting | 208 | GCCACCCCAAAAAUGAAGGGGACUAAAA |
| | Influenza B-Victoria V1 | | CACCUACUUCGUUCCCCCCAGA |
| | CasM.26 crRNA targeting | 209 | GCCACCCCAAAAAUGAAGGGGACUAAAA |
| | Influenza B-Yamagata Y1 | | CAAAACCCGCCAACACUGCAUU |
| | CasM.26 crRNA targeting | 210 | GCCACCCCAAAAAUGAAGGGGACUAAAA |
| | Influenza B-Yamagata Y1 | | CAUUUUCACACUUCAUUGUUGA |
| | CasM.26 crRNA targeting | 211 | GCCACCCCAAAAAUGAAGGGGACUAAAA |
| | Influenza B-Yamagata Y1 | | CAGGAUCUUCACUAAAUUCUGC |
| | CasM.26 crRNA targeting | 212 | GCCACCCCAAAAAUGAAGGGGACUAAAA |
| | Influenza A H1 | | CAGCACACAGAAUGCCAUUAAC |
| | CasM.26 crRNA targeting | 213 | GCCACCCCAAAAAUGAAGGGGACUAAAA |
| | Influenza A H1 | | CAACAUUUACAACCGCAAAUGC |
| | CasM.26 crRNA targeting | 214 | GCCACCCCAAAAAUGAAGGGGACUAAAA |
| | Influenza A H1 | | CAUACCCAGGAGAUUUCAUCAA |
| | CasM.26 crRNA targeting | 215 | GCCACCCCAAAAAUGAAGGGGACUAAAA |
| | Influenza A H1 | | CAAAUGAAAGAACUUUGGACUA |
| | CasM.26 crRNA targeting | 216 | GCCACCCCAAAAAUGAAGGGGACUAAAA |
| | Influenza A H1 | | CAAUGAAGGCAAUACUAGUAGU |
| | CasM.26 crRNA targeting | 217 | GCCACCCCAAAAAUGAAGGGGACUAAAA |
| | Influenza A H1 | | CAUCAUCAUUUGAAAGGUUUGA |
| | CasM.26 crRNA targeting | 218 | GCCACCCCAAAAAUGAAGGGGACUAAAA |
| | Influenza A H2 | | CAAGACAAAGAAUCCACUCAAA |
| | CasM.26 crRNA targeting | 219 | GCCACCCCAAAAAUGAAGGGGACUAAAA |
| | Influenza A H2 | | CAGCUAUCAUGAUUGCCAGUGA |
| | CasM.26 crRNA targeting | 220 | GCCACCCCAAAAAUGAAGGGGACUAAAA |
| | Influenza A H2 | | CACAGACAAAGAAUCCACUCAA |
| | CasM.26 crRNA targeting | 221 | GCCACCCCAAAAAUGAAGGGGACUAAAA |
| | Influenza A H3 | | CACAUGAUAUGGCAAAGGAAAU |
| | CasM.26 crRNA targeting | 222 | GCCACCCCAAAAAUGAAGGGGACUAAAA |
| | Influenza A H3 | | CAUGGAUUUCCUUUGCCAUAUC |
| | CasM.26 crRNA targeting | 223 | GCCACCCCAAAAAUGAAGGGGACUAAAA |
| | Influenza A H3 | | CAUCCCAACCAUUUUCUAUGAA |
| | CasM.26 crRNA targeting | 224 | GCCACCCCAAAAAUGAAGGGGACUAAAA |
| | Influenza A H4 | | CAUGUAGAACCAGGAGAUCUCA |
| | CasM.26 crRNA targeting | 225 | GCCACCCCAAAAAUGAAGGGGACUAAAA |
| | Influenza A H4 | | CACAACAACUGCAUCGAAAGCA |
| | CasM.26 crRNA targeting | 226 | GCCACCCCAAAAAUGAAGGGGACUAAAA |
| | Influenza A H4 | | CAGGCAACCAGAGGUCUGUUUG |
| | CasM.26 crRNA targeting | 227 | GCCACCCCAAAAAUGAAGGGGACUAAAA |
| | Influenza A H4 | | CAAUAGUUUUCAAUACCAUAGG |
| | CasM.26 crRNA targeting | 228 | GCCACCCCAAAAAUGAAGGGGACUAAAA |
| | Influenza A H4 | | CAUAAAUCUGAUGGGAAUGCAU |
| | CasM.26 crRNA targeting | 229 | GCCACCCCAAAAAUGAAGGGGACUAAAA |
| | Influenza A H4 | | CAUGCUCUGGGAAGCCCGGGUU |
| | CasM.26 crRNA targeting | 230 | GCCACCCCAAAAAUGAAGGGGACUAAAA |
| | Influenza A H5 | | CAGAAGACGGAUUCCUAGAUGU |
| | CasM.26 crRNA targeting | 231 | GCCACCCCAAAAAUGAAGGGGACUAAAA |
| | Influenza A H5 | | CAUCAGAAGAAGCAAGAUUAAA |
| | CasM.26 crRNA targeting | 230 | GCCACCCCAAAAAUGAAGGGGACUAAAA |
| | Influenza A H5 | | CAGAAGACGGAUUCCUAGAUGU |
| | CasM.26 crRNA targeting | 232 | GCCACCCCAAAAAUGAAGGGGACUAAAA |
| | Influenza A H5 | | CACAGUAUUCAGAAGAAGCAAG |
| | CasM.26 crRNA targeting | 233 | GCCACCCCAAAAAUGAAGGGGACUAAAA |
| | Influenza A H5 | | CAGACACACAACGGGAAGCUCU |
| | CasM.26 crRNA targeting | 234 | GCCACCCCAAAAAUGAAGGGGACUAAAA |
| | Influenza A H5 | | CAAGACAUACUGGAAAAGACAC |
| | CasM.26 crRNA targeting | 235 | GCCACCCCAAAAAUGAAGGGGACUAAAA |
| | Influenza A H6 | | CAGGUCUUUGGAUGUGUUCAAA |
| | CasM.26 crRNA targeting | 236 | GCCACCCCAAAAAUGAAGGGGACUAAAA |
| | Influenza A H6 | | CAUGGAUGUGUUCAAAUGGUUC |
| | CasM.26 crRNA targeting | 237 | GCCACCCCAAAAAUGAAGGGGACUAAAA |
| | Influenza A H6 | | CACUUUGGAUGUGUUCAAAUGG |
| | CasM.26 crRNA targeting | 238 | GCCACCCCAAAAAUGAAGGGGACUAAAA |
| | Influenza A H6 | | CAGUUCUUCUUGAAAACGAAAG |
| | CasM.26 crRNA targeting | 239 | GCCACCCCAAAAAUGAAGGGGACUAAAA |
| | Influenza A H6 | | CAAGUACGGUAUCGAGCAGUCU |
| | CasM.26 crRNA targeting | 240 | GCCACCCCAAAAAUGAAGGGGACUAAAA |
| | Influenza A H6 | | CACUUGGUGAUCAAAGCUGGUC |
| | CasM.26 crRNA targeting | 241 | GCCACCCCAAAAAUGAAGGGGACUAAAA |
| | Influenza A H7 | | CAAUAUACAAAUAGUGCACCGC |
| | CasM.26 crRNA targeting | 242 | GCCACCCCAAAAAUGAAGGGGACUAAAA |
| | Influenza A H7 | | CAUAUACAAAUAGUGCACCGCA |
| | CasM.26 crRNA targeting | 243 | GCCACCCCAAAAAUGAAGGGGACUAAAA |
| | Influenza A H7 | | CAUGCGGUGCACUAUUUGUAUA |
| | CasM.26 crRNA targeting | 244 | GCCACCCCAAAAAUGAAGGGGACUAAAA |
| | Influenza A H8 | | CAGAACAUGCAUCUACAAGAUC |
| | CasM.26 crRNA targeting | 245 | GCCACCCCAAAAAUGAAGGGGACUAAAA |
| | Influenza A H8 | | CAAACAUGCAUCUACAAGAUCC |
| | CasM.26 crRNA targeting | 246 | GCCACCCCAAAAAUGAAGGGGACUAAAA |
| | Influenza A H8 | | CAAUCUUGUAGAUGCAUGUUCU |
| | CasM.26 crRNA targeting | 247 | GCCACCCCAAAAAUGAAGGGGACUAAAA |
| | Influenza A H9 | | CAAAGGCAGCAAACCCCAUUGC |
| | CasM.26 crRNA targeting | 248 | GCCACCCCAAAAAUGAAGGGGACUAAAA |
| | Influenza A H9 | | CAAGGCAGCAAACCCCAUUGCA |
| | CasM.26 crRNA targeting | 249 | GCCACCCCAAAAAUGAAGGGGACUAAAA |
| | Influenza A H9 | | CAGGCAGCAAACCCCAUUGCAA |
| | CasM.26 crRNA targeting | 250 | GCCACCCCAAAAAUGAAGGGGACUAAAA |
| | Influenza A H10 | | CAGGUUUAGCUUCGGGGCAUCA |
| | CasM.26 crRNA targeting | 251 | GCCACCCCAAAAAUGAAGGGGACUAAAA |
| | Influenza A H10 | | CAUGUGGGGAAUUCAUCACCCU |
| | CasM.26 crRNA targeting | 252 | GCCACCCCAAAAAUGAAGGGGACUAAAA |
| | Influenza A H10 | | CAUCACCUUCUCACACAAUGGG |
| | CasM.26 crRNA targeting | 253 | GCCACCCCAAAAAUGAAGGGGACUAAAA |
| | Influenza A H10 | | CAUGGAAACAUGCGAUGCACAA |
| | CasM.26 crRNA targeting | 254 | GCCACCCCAAAAAUGAAGGGGACUAAAA |
| | Influenza A H10 | | CACUGAGCUAUUGGUAGCAAUG |
| | CasM.26 crRNA targeting | 255 | GCCACCCCAAAAAUGAAGGGGACUAAAA |
| | Influenza A H10 | | CAUCUUGAUAAAAUCUGCCUAG |
| | CasM.26 crRNA targeting | 256 | GCCACCCCAAAAAUGAAGGGGACUAAAA |
| | Influenza A H11 | | CAACAGCUGCAUUGCAAGCAGU |
| | CasM.26 crRNA targeting | 257 | GCCACCCCAAAAAUGAAGGGGACUAAAA |
| | Influenza A H11 | | CAUGCAAAUGGUACAUCUACAU |
| | CasM.26 crRNA targeting | 258 | GCCACCCCAAAAAUGAAGGGGACUAAAA |
| | Influenza A H11 | | CAACUUGCAAUGCAGCUGUAAA |
| | CasM.26 crRNA targeting | 259 | GCCACCCCAAAAAUGAAGGGGACUAAAA |
| | Influenza A H12 | | CAAUGAAACCCCCAAUAAUCAU |
| | CasM.26 crRNA targeting | 260 | GCCACCCCAAAAAUGAAGGGGACUAAAA |
| | Influenza A H12 | | CAAAUGAAACCCCCAAUAAUCA |
| | CasM.26 crRNA targeting | 261 | GCCACCCCAAAAAUGAAGGGGACUAAAA |
| | Influenza A H12 | | CAUAAGCUUGAGGCAACACUGC |
| | CasM.26 crRNA targeting | 262 | GCCACCCCAAAAAUGAAGGGGACUAAAA |
| | Influenza A H13 | | CAACAACACUGCUUGCAAUGCA |
| | CasM.26 crRNA targeting | 263 | GCCACCCCAAAAAUGAAGGGGACUAAAA |
| | Influenza A H13 | | CACAACACUGCUUGCAAUGCAG |
| | CasM.26 crRNA targeting | 264 | GCCACCCCAAAAAUGAAGGGGACUAAAA |
| | Influenza A H13 | | CAUACAACACUGCUUGCAAUGC |
| | CasM.26 crRNA targeting | 265 | GCCACCCCAAAAAUGAAGGGGACUAAAA |
| | Influenza A H14 | | CAACAAAGCAUGACAUGGAGAA |
| | CasM.26 crRNA targeting | 266 | GCCACCCCAAAAAUGAAGGGGACUAAAA |
| | Influenza A H14 | | CAUAGAGAAGACAAAUGAAAAA |
| | CasM.26 crRNA targeting | 267 | GCCACCCCAAAAAUGAAGGGGACUAAAA |
| | Influenza A H14 | | CAACCCAUUCGAUGUUCCAGAU |
| | CasM.26 crRNA targeting | 268 | GCCACCCCAAAAAUGAAGGGGACUAAAA |
| | Influenza A H15 | | CAAAGGGGCAUUAGAGCGGAGA |
| | CasM.26 crRNA targeting | 269 | GCCACCCCAAAAAUGAAGGGGACUAAAA |
| | Influenza A H15 | | CAACCAGGUGUUCCCACAACUA |
| | CasM.26 crRNA targeting | 270 | GCCACCCCAAAAAUGAAGGGGACUAAAA |
| | Influenza A H15 | | CAUACAAAAUAGGAUAAUGAUC |
| | CasM.26 crRNA targeting | 271 | GCCACCCCAAAAAUGAAGGGGACUAAAA |
| | Influenza A H16 | | CAGAGUGGAGUGAGGAUGGCCA |
| | CasM.26 crRNA targeting | 272 | GCCACCCCAAAAAUGAAGGGGACUAAAA |
| | Influenza A H16 | | CAGGUGAUUUGGGGAAUCCACC |
| | CasM.26 crRNA targeting | 273 | GCCACCCCAAAAAUGAAGGGGACUAAAA |
| | Influenza A H16 | | CAUGGAGUAAACUCUUUUAGCA |
| | CasM.26 crRNA targeting | 274 | GCCACCCCAAAAAUGAAGGGGACUAAAA |
| | Influenza A H16 | | CACAAACGCUAUGAGCUCGAGA |
| | CasM.26 crRNA targeting | 275 | GCCACCCCAAAAAUGAAGGGGACUAAAA |
| | Influenza A H16 | | CAGCACGAUGCAAAUGUCAGAA |
| | CasM.26 crRNA targeting | 276 | GCCACCCCAAAAAUGAAGGGGACUAAAA |
| | Influenza A H16 | | CAGAUGAACGGAAAUUAUGAUU |
| | CasM.26 crRNA targeting | 277 | GCCACCCCAAAAAUGAAGGGGACUAAAA |
| | Influenza A N1 | | CAUGGUCUUGGCCAGACGGUGC |
| | CasM.26 crRNA targeting | 278 | GCCACCCCAAAAAUGAAGGGGACUAAAA |
| | Influenza A N1 | | CAUCCAAGGGGGAUGUGUUUGU |
| | CasM.26 crRNA targeting | 279 | GCCACCCCAAAAAUGAAGGGGACUAAAA |
| | Influenza A N1 | | CAAGAACACAAGAGUCUGAAUG |
| | CasM.26 crRNA targeting | 280 | GCCACCCCAAAAAUGAAGGGGACUAAAA |
| | Influenza A N1 | | CAGUUUGGAUAGGGAGAACUAA |
| | CasM.26 crRNA targeting | 281 | GCCACCCCAAAAAUGAAGGGGACUAAAA |
| | Influenza A N1 | | CAUUUGAGUCAGUCGCUUGGUC |
| | CasM.26 crRNA targeting | 282 | GCCACCCCAAAAAUGAAGGGGACUAAAA |
| | Influenza A N1 | | CAUCUAGUGAAAUCACAUGUGU |
| | CasM.26 crRNA targeting | 283 | GCCACCCCAAAAAUGAAGGGGACUAAAA |
| | Influenza A N2 | | CAUUAUGGAACAGGCUCAUGGC |
| | CasM.26 crRNA targeting | 284 | GCCACCCCAAAAAUGAAGGGGACUAAAA |
| | Influenza A N2 | | CACUCCAUCAGGCCAUGAGCCU |
| | CasM.26 crRNA targeting | 285 | GCCACCCCAAAAAUGAAGGGGACUAAAA |
| | Influenza A N2 | | CAUGCCCCAUCAGGCCAUGAGC |
| | CasM.26 crRNA targeting | 286 | GCCACCCCAAAAAUGAAGGGGACUAAAA |
| | Influenza A N3 | | CAAUCCUUUGAUUUGGAUUCAU |
| | CasM.26 crRNA targeting | 287 | GCCACCCCAAAAAUGAAGGGGACUAAAA |
| | Influenza A N3 | | CAUUAUCUUCUGAUUUGGAUUC |
| | CasM.26 crRNA targeting | 288 | GCCACCCCAAAAAUGAAGGGGACUAAAA |
| | Influenza A N3 | | CAUAUCCUUUGAUUCGGAUUCA |
| | CasM.26 crRNA targeting | 289 | GCCACCCCAAAAAUGAAGGGGACUAAAA |
| | Influenza A N4 | | CAGACCAACCUGUGGUAUCAGA |
| | CasM.26 crRNA targeting | 290 | GCCACCCCAAAAAUGAAGGGGACUAAAA |
| | Influenza A N4 | | CACUCUGUUGCCUUUUGACAUA |
| | CasM.26 crRNA targeting | 291 | GCCACCCCAAAAAUGAAGGGGACUAAAA |
| | Influenza A N4 | | CACCAACCUGUGGUAUCGGAAU |
| | CasM.26 crRNA targeting | 292 | GCCACCCCAAAAAUGAAGGGGACUAAAA |
| | Influenza A N5 | | CAUAAUAACAGACACUAUCAAG |
| | CasM.26 crRNA targeting | 293 | GCCACCCCAAAAAUGAAGGGGACUAAAA |
| | Influenza A N5 | | CAUGGAAUGCAGAACUUUCUUU |
| | CasM.26 crRNA targeting | 294 | GCCACCCCAAAAAUGAAGGGGACUAAAA |
| | Influenza A N5 | | CAGAACUCAAGAGUCUGAAUGU |
| | CasM.26 crRNA targeting | 295 | GCCACCCCAAAAAUGAAGGGGACUAAAA |
| | Influenza A N5 | | CAGCGGCUUUGAAAUGAUUUGG |
| | CasM.26 crRNA targeting | 296 | GCCACCCCAAAAAUGAAGGGGACUAAAA |
| | Influenza A N5 | | CAGUGUCUGGAUCGGGAGAACC |
| | CasM.26 crRNA targeting | 297 | GCCACCCCAAAAAUGAAGGGGACUAAAA |
| | Influenza A N5 | | CAUCGAAUUGGAUGCUCCUAAU |
| | CasM.26 crRNA targeting | 298 | GCCACCCCAAAAAUGAAGGGGACUAAAA |
| | Influenza A N6 | | CAAUGAUGACCCACACAAGCAA |
| | CasM.26 crRNA targeting | 299 | GCCACCCCAAAAAUGAAGGGGACUAAAA |
| | Influenza A N6 | | CAAAGAUAACAUGCAUUUCAGC |
| | CasM.26 crRNA targeting | 300 | GCCACCCCAAAAAUGAAGGGGACUAAAA |
| | Influenza A N6 | | CAAAUGACCCCACCAAUGGGAA |
| | CasM.26 crRNA targeting | 301 | GCCACCCCAAAAAUGAAGGGGACUAAAA |
| | Influenza A N6 | | CAGAAUGCAUAGGAUGGUCAAG |
| | CasM.26 crRNA targeting | 302 | GCCACCCCAAAAAUGAAGGGGACUAAAA |
| | Influenza A N6 | | CAAACAUUCCAAACAUGAAUGA |
| | CasM.26 crRNA targeting | 303 | GCCACCCCAAAAAUGAAGGGGACUAAAA |
| | Influenza A N6 | | CAAAUAACAAUGCAUCGGCAGU |
| | CasM.26 crRNA targeting | 304 | GCCACCCCAAAAAUGAAGGGGACUAAAA |
| | Influenza A N7 | | CAGUGAUUGAGAAUGAAUCCUA |
| | CasM.26 crRNA targeting | 305 | GCCACCCCAAAAAUGAAGGGGACUAAAA |
| | Influenza A N7 | | CAUGAAAGUGAACAAAUAAUAG |
| | CasM.26 crRNA targeting | 306 | GCCACCCCAAAAAUGAAGGGGACUAAAA |
| | Influenza A N7 | | CAUUCCUUCCCCGAUGGGGCAC |
| | CasM.26 crRNA targeting | 307 | GCCACCCCAAAAAUGAAGGGGACUAAAA |
| | Influenza A N7 | | CAUUGGUGGACGAGCAACAGUU |
| | CasM.26 crRNA targeting | 308 | GCCACCCCAAAAAUGAAGGGGACUAAAA |
| | Influenza A N7 | | CAAGGAAGUUUCAUUGACUAUU |
| | CasM.26 crRNA targeting | 309 | GCCACCCCAAAAAUGAAGGGGACUAAAA |
| | Influenza A N7 | | CAUACCACAAUAAAAACAUGGG |
| | CasM.26 crRNA targeting | 310 | GCCACCCCAAAAAUGAAGGGGACUAAAA |
| | Influenza A N8 | | CAGGCUCCAUUUCAUUAGGGUU |
| | CasM.26 crRNA targeting | 311 | GCCACCCCAAAAAUGAAGGGGACUAAAA |
| | Influenza A N8 | | CAUGGCACGAUGGAGCUAUUCU |
| | CasM.26 crRNA targeting | 312 | GCCACCCCAAAAAUGAAGGGGACUAAAA |
| | Influenza A N8 | | CACACGAUGGAGCUAUUCUUCC |
| | CasM.26 crRNA targeting | 313 | GCCACCCCAAAAAUGAAGGGGACUAAAA |
| | Influenza A N8 | | CAAUGAAUCCAAAUCAGAAAAU |
| | CasM.26 crRNA targeting | 314 | GCCACCCCAAAAAUGAAGGGGACUAAAA |
| | Influenza A N8 | | CAGAUGGAGCUAUUCUUCCUUU |
| | CasM.26 crRNA targeting | 315 | GCCACCCCAAAAAUGAAGGGGACUAAAA |
| | Influenza A N8 | | CAUGGUCAGGAUACAGUGGUUC |
| | CasM.26 crRNA targeting | 316 | GCCACCCCAAAAAUGAAGGGGACUAAAA |
| | Influenza A N9 | | CAUGGCCACUAUCAUCACCGCC |
| | CasM.26 crRNA targeting | 317 | GCCACCCCAAAAAUGAAGGGGACUAAAA |
| | Influenza A N9 | | CAUUGAACAUAGGACUGCAUCU |
| | CasM.26 crRNA targeting | 318 | GCCACCCCAAAAAUGAAGGGGACUAAAA |
| | Influenza A N9 | | CAAUGUUAAAAGUGCCAAAUGC |
| | CasM.26 crRNA targeting | 319 | GCCACCCCAAAAAUGAAGGGGACUAAAA |
| | Influenza A N9 | | CAAUCACCCAAAUAAGCAACAC |
| | CasM.26 crRNA targeting | 320 | GCCACCCCAAAAAUGAAGGGGACUAAAA |
| | Influenza A N9 | | CAACAGAAUUCCUGGGACAAUG |
| | CasM.26 crRNA targeting | 321 | GCCACCCCAAAAAUGAAGGGGACUAAAA |
| | Influenza A N9 | | CAACCAGCAAUAGUAUAGUAUC |
| | Cas12 Variant gRNA targeting | 322 | UAAUUUCUACUAAGUGUAGAUAGCAAUC |
| | Bordetella parapertussis | | CUGGCCACUAUUU |
| | Cas12 Variant gRNA targeting | 323 | UAAUUUCUACUAAGUGUAGAUUAGUUCC |
| | Bordetella parapertussis | | ACCUGAAGGCAUG |
| | Cas12 Variant gRNA targeting | 324 | UAAUUUCUACUAAGUGUAGAUGAUGCG |
| | Bordetella parapertussis | | GUGAGUAUGGCGAC |
| | Cas12 Variant gRNA targeting | 325 | UAAUUUCUACUAAGUGUAGAUGGGUAC |
| | Bordetella pertussis | | UUCAAUGGCCGCGA |
| | Cas12 Variant gRNA targeting | 326 | UAAUUUCUACUAAGUGUAGAUGCCUGAA |
| | Bordetella pertussis | | CCCUCCUAGCUGU |
| | Cas12 Variant gRNA targeting | 327 | UAAUUUCUACUAAGUGUAGAUCAUGAA |
| | Bordetella pertussis | | GAGCUUGGCUUCCA |
| | Cas12 Variant gRNA targeting | 328 | UAAUUUCUACUAAGUGUAGAUUACGACG |
| | Bordetella bronchoseptica | | UCUACGAAUGCGC |
| | Cas12 Variant gRNA targeting | 329 | UAAUUUCUACUAAGUGUAGAUGCGUUCG |
| | Bordetella bronchoseptica | | AUUACCUGGAAGG |
| | Cas12 Variant gRNA targeting | 330 | UAAUUUCUACUAAGUGUAGAUAUCGGCC |
| | Bordetella bronchoseptica | | AUGAAGGCCGCCU |
| | Cas12 Variant gRNA targeting | 331 | UAAUUUCUACUAAGUGUAGAUGCCACUG |
| | Bordetella holmesii | | CCAUCUCUUUCAU |
| | Cas12 Variant gRNA targeting | 332 | UAAUUUCUACUAAGUGUAGAUCGCCUGC |
| | Bordetella holmesii | | UUGGUAGGCCCAG |
| | Cas12 Variant gRNA targeting | 333 | UAAUUUCUACUAAGUGUAGAUCCUGAAG |
| | Bordetella holmesii | | CCUUCAGCGCGAA |
| | Cas12 Variant gRNA targeting | 334 | UAAUUUCUACUAAGUGUAGAUUAUCCUG |
| | Chlamydophila pneumoniae | | AGGUUUCAGUCUC |
| | Cas12 Variant gRNA targeting | 335 | UAAUUUCUACUAAGUGUAGAUGGAUGU |
| | Chlamydophila pneumoniae | | GUGAUGCUUGCUUU |
| | Cas12 Variant gRNA targeting | 336 | UAAUUUCUACUAAGUGUAGAUGCUCAGC |
| | Chlamydophila pneumoniae | | UGCCUAAGGAAUU |
| | Cas12 Variant gRNA targeting | 337 | UAAUUUCUACUAAGUGUAGAUGAUUUG |
| | Legionella pneumophila | | GGCGGCAAUGUGAA |
| | Cas12 Variant gRNA targeting | 338 | UAAUUUCUACUAAGUGUAGAUACGCAAC |
| | Legionella pneumophila | | ACCAGGAAGUGGA |
| | Cas12 Variant gRNA targeting | 339 | UAAUUUCUACUAAGUGUAGAUCCGGGAG |
| | Legionella pneumophila | | CCAGUUCCAAUUA |
| | Cas12 Variant gRNA targeting | 340 | UAAUUUCUACUAAGUGUAGAUAGCUCGA |
| | Mycoplasma pneumoniae | | UAAGGGCCGCGCG |
| | Cas12 Variant gRNA targeting | 341 | UAAUUUCUACUAAGUGUAGAUGUGGCA |
| | Mycoplasma pneumoniae | | GUUGGGUCAACCGG |
| | Cas12 Variant gRNA targeting | 342 | UAAUUUCUACUAAGUGUAGAUUGGUAA |
| | Mycoplasma pneumoniae | | AGGACCUUGCGCAU |
| | Cas12 Variant gRNA targeting | 343 | UAAUUUCUACUAAGUGUAGAUUGUAAU |
| | Human bocavirus | | GUUCUGGAAGCGGC |
| | Cas12 Variant gRNA targeting | 344 | UAAUUUCUACUAAGUGUAGAUGUGGGA |
| | Human bocavirus | | GGAGUGCUUAAUGC |
| | Cas12 Variant gRNA targeting | 345 | UAAUUUCUACUAAGUGUAGAUGCAUUCC |
| | Human bocavirus | | UCUUGCUUAGUCC |
| | Cas12 Variant gRNA targeting | 346 | UAAUUUCUACUAAGUGUAGAUCUCGUCA |
| | Human bocavirus | | GUUAUCUCGUCUG |
| | Cas12 Variant gRNA targeting | 347 | UAAUUUCUACUAAGUGUAGAUAGUAUG |
| | Human bocavirus | | GCUGAAUUCUGCCU |
| | Cas12 Variant gRNA targeting | 348 | UAAUUUCUACUAAGUGUAGAUCUGCAGG |
| | Human adenovirus Type A | | UGUUUGAAGAUCC |
| | Cas12 Variant gRNA targeting | 349 | UAAUUUCUACUAAGUGUAGAUUCCAGGC |
| | Human adenovirus Type A | | UCAAGAAUGGAGC |
| | Cas12 Variant gRNA targeting | 350 | UAAUUUCUACUAAGUGUAGAUUUAAAG |
| | Human adenovirus Type A | | ACGUGCUACCUGAG |
| | Cas12 Variant gRNA targeting | 351 | UAAUUUCUACUAAGUGUAGAUACUCCUC |
| | Human adenovirus Type A | | CUAUGCGCGAUGU |
| | Cas12 Variant gRNA targeting | 352 | UAAUUUCUACUAAGUGUAGAUCCAGGGU |
| | Human adenovirus Type A | | GAAGUAGGUGUCC |
| | Cas12 Variant gRNA targeting | 353 | UAAUUUCUACUAAGUGUAGAUGAACCUC |
| | Human adenovirus Type B | | UUCCAAGGAAGCU |
| | Cas12 Variant gRNA targeting | 354 | UAAUUUCUACUAAGUGUAGAUCAUCACA |
| | Human adenovirus Type B | | AGACAAGCCACAG |
| | Cas12 Variant gRNA targeting | 355 | UAAUUUCUACUAAGUGUAGAUAAGCUG |
| | Human adenovirus Type B | | AUGCCAGAGCAGCA |
| | Cas12 Variant gRNA targeting | 356 | UAAUUUCUACUAAGUGUAGAUUUGAUG |
| | Human adenovirus Type C | | GCUUGCAAUUGGCC |
| | Cas12 Variant gRNA targeting | 357 | UAAUUUCUACUAAGUGUAGAUUCCACCA |
| | Human adenovirus Type C | | GACCACGGAAGAG |
| | Cas12 Variant gRNA targeting | 358 | UAAUUUCUACUAAGUGUAGAUCUCCAGC |
| | Human adenovirus Type C | | GCGCUUACAAAGU |
| | Cas12 Variant gRNA targeting | 359 | UAAUUUCUACUAAGUGUAGAUCUAGGG |
| | Human adenovirus Type D | | GAAGAUGGAGGAGC |
| | Cas12 Variant gRNA targeting | 360 | UAAUUUCUACUAAGUGUAGAUCCUCCCA |
| | Human adenovirus Type D | | GCGAUUCAGAGGA |
| | Cas12 Variant gRNA targeting | 361 | UAAUUUCUACUAAGUGUAGAUUCACCGA |
| | Human adenovirus Type D | | GCGCGGACACAGA |
| | Cas12 Variant gRNA targeting | 362 | UAAUUUCUACUAAGUGUAGAUAUGAAG |
| | Human adenovirus Type E | | GCCAUGUACCCGGG |
| | Cas12 Variant gRNA targeting | 363 | UAAUUUCUACUAAGUGUAGAUUACAAGC |
| | Human adenovirus Type E | | GGCCACAGUGCUC |
| | Cas12 Variant gRNA targeting | 364 | UAAUUUCUACUAAGUGUAGAUUUGUCCG |
| | Human adenovirus Type E | | AGAGCACGUUGUA |
| | Cas12 Variant gRNA targeting | 365 | UAAUUUCUACUAAGUGUAGAUUCUCGUU |
| | Human adenovirus Type F | | GUAGACGACACUG |
| | Cas12 Variant gRNA targeting | 366 | UAAUUUCUACUAAGUGUAGAUUCUCUUA |
| | Human adenovirus Type F | | AUAGACGCCCCAC |
| | Cas12 Variant gRNA targeting | 367 | UAAUUUCUACUAAGUGUAGAUUCCUCCC |
| | Human adenovirus Type F | | CUUACAAACAGUA |
| | Cas12 Variant gRNA targeting | 368 | UAAUUUCUACUAAGUGUAGAUGCACUAG |
| | Human adenovirus Type F | | AUGCAGCGCUGCC |
| | Cas12 Variant gRNA targeting | 369 | UAAUUUCUACUAAGUGUAGAUACCACAG |
| | Human adenovirus Type F | | CUGGGUAUUUGGA |
| | Cas12 Variant gRNA targeting | 370 | UAAUUUCUACUAAGUGUAGAUAACCAUG |
| | Human adenovirus Type F | | AAGGUGUGCCUGC |
| | Cas12 Variant gRNA targeting | 371 | UAAUUUCUACUAAGUGUAGAUAAUACCC |
| | Human adenovirus Type G | | AGCGAAAACGCUG |
| | Cas12 Variant gRNA targeting | 372 | UAAUUUCUACUAAGUGUAGAUGCUCCAC |
| | Human adenovirus Type G | | GAUUAAAUCCUAC |
| | Cas12 Variant gRNA targeting | 373 | UAAUUUCUACUAAGUGUAGAUGGUCAAC |
| | Human adenovirus Type G | | AUGUAUCUGAGCC |
| | CasM.26 crRNA targeting | 374 | GCCACCCCAAAAAUGAAGGGGACUAAAA |
| | Bordetella holmesii | | CACCCCCGCUACCGGGCACGUU |
| | CasM.26 crRNA targeting | 375 | GCCACCCCAAAAAUGAAGGGGACUAAAA |
| | Bordetella holmesii | | CAGCUACCGGGCACGUUCCGAU |
| | CasM.26 crRNA targeting | 376 | GCCACCCCAAAAAUGAAGGGGACUAAAA |
| | Bordetella holmesii | | CAACACUCUAGCUCGGUAGUUA |
| | CasM.26 crRNA targeting | 377 | GCCACCCCAAAAAUGAAGGGGACUAAAA |
| | Bordetella holmesii | | CAACACACCCGCAGCUUCGGUU |
| | CasM.26 crRNA targeting | 378 | GCCACCCCAAAAAUGAAGGGGACUAAAA |
| | Bordetella holmesii | | CAUACAUAGUACACACCCGCAG |
| | CasM.26 crRNA targeting | 379 | GCCACCCCAAAAAUGAAGGGGACUAAAA |
| | Bordetella holmesii | | CACGUGUACAUAGUACACACCC |
| | CasM.26 crRNA targeting | 380 | GCCACCCCAAAAAUGAAGGGGACUAAAA |
| | Bordetella holmesii | | CAUCGCGCUGAAGGCUUCAGGU |
| | CasM.26 crRNA targeting | 381 | GCCACCCCAAAAAUGAAGGGGACUAAAA |
| | Bordetella holmesii | | CAAUCGUCUUGCGGUCCAGCAU |
| | CasM.26 crRNA targeting | 382 | GCCACCCCAAAAAUGAAGGGGACUAAAA |
| | Bordetella holmesii | | CAGAUCGUCUUGCGGUCCAGCA |
| | CasM.26 crRNA targeting | 383 | GCCACCCCAAAAAUGAAGGGGACUAAAA |
| | Bordetella pertussis | | CACUACCGCGCGCACUAAAAGU |
| | CasM.26 crRNA targeting | 384 | GCCACCCCAAAAAUGAAGGGGACUAAAA |
| | Bordetella pertussis | | CAGCGCACUAAAAGUGCACACC |
| | CasM.26 crRNA targeting | 385 | GCCACCCCAAAAAUGAAGGGGACUAAAA |
| | Bordetella pertussis | | CAGCGCGCACUAAAAGUGCACA |
| | CasM.26 crRNA targeting | 386 | GCCACCCCAAAAAUGAAGGGGACUAAAA |
| | Bordetella pertussis | | CACUACAACUGGCAGCGACCCC |
| | CasM.26 crRNA targeting | 387 | GCCACCCCAAAAAUGAAGGGGACUAAAA |
| | Bordetella pertussis | | CAACCACUACAACUGGCAGCGA |
| | CasM.26 crRNA targeting | 388 | GCCACCCCAAAAAUGAAGGGGACUAAAA |
| | Bordetella pertussis | | CAUACAACUGGCAGCGACCCCA |
| | CasM.26 crRNA targeting | 389 | GCCACCCCAAAAAUGAAGGGGACUAAAA |
| | Bordetella parapertussis | | CAUAUUCCGCUUUGCUCGGCCU |
| | CasM.26 crRNA targeting | 390 | GCCACCCCAAAAAUGAAGGGGACUAAAA |
| | Bordetella parapertussis | | CAAGCAACUUGCGAUCCAGCAU |
| | CasM.26 crRNA targeting | 391 | GCCACCCCAAAAAUGAAGGGGACUAAAA |
| | Bordetella parapertussis | | CAGGCUAUUCCGCUUUGCUCGG |
| | CasM.26 crRNA targeting | 392 | GCCACCCCAAAAAUGAAGGGGACUAAAA |
| | Bordetella bronchiosceptica | | CAGGUCAUCAGGGUGUUGGAUG |
| | CasM.26 crRNA targeting | 393 | GCCACCCCAAAAAUGAAGGGGACUAAAA |
| | Bordetella bronchiosceptica | | CAGAUGGCUCGCCGGGUAGGGC |
| | CasM.26 crRNA targeting | 394 | GCCACCCCAAAAAUGAAGGGGACUAAAA |
| | Bordetella bronchiosceptica | | CACCGGGUAGGGCGGCCAAUUG |
| | CasM.26 crRNA targeting | 395 | GCCACCCCAAAAAUGAAGGGGACUAAAA |
| | Bordetella bronchiosceptica | | CAGAUACCGACUCGGCGCUGCG |
| | CasM.26 crRNA targeting | 396 | GCCACCCCAAAAAUGAAGGGGACUAAAA |
| | Influenza A | | CAAUAAUAACAAUUGGCUCAAU |
| | CasM.26 crRNA targeting | 397 | GCCACCCCAAAAAUGAAGGGGACUAAAA |
| | Influenza A | | CAAUAACAAUUGGCUCAAUAUC |
| | CasM.26 crRNA targeting | 398 | GCCACCCCAAAAAUGAAGGGGACUAAAA |
| | Influenza A | | CAACAAUUGGCUCAAUAUCAUU |
| | CasM.26 crRNA targeting | 399 | GCCACCCCAAAAAUGAAGGGGACUAAAA |
| | chlamydia pneumoniae | | CACGCUCGUUGCGGGACUUAAC |
| | CasM.26 crRNA targeting | 400 | GCCACCCCAAAAAUGAAGGGGACUAAAA |
| | chlamydia pneumoniae | | CAUGGCGCGAUGAUUCUCGAUU |
| | CasM.26 crRNA targeting | 401 | GCCACCCCAAAAAUGAAGGGGACUAAAA |
| | chlamydia pneumoniae | | CAGGUCUGGGCUGUUCCCCUCU |
| | CasM.26 crRNA targeting | 402 | GCCACCCCAAAAAUGAAGGGGACUAAAA |
| | chlamydia pneumoniae | | CACGACUGGGUUGUAGCAAAAC |
| | CasM.26 crRNA targeting | 403 | GCCACCCCAAAAAUGAAGGGGACUAAAA |
| | legionella pneumophila | | CAGUAUCAGUGUUCCCGAAGGC |
| | CasM.26 crRNA targeting | 404 | GCCACCCCAAAAAUGAAGGGGACUAAAA |
| | legionella pneumophila | | CAAGGGUGGCUGCUUCUAAGCC |
| | CasM.26 crRNA targeting | 405 | GCCACCCCAAAAAUGAAGGGGACUAAAA |
| | legionella pneumophila | | CAAGGGGAAGCCUUUUUAACUG |
| | CasM.26 crRNA targeting | 406 | GCCACCCCAAAAAUGAAGGGGACUAAAA |
| | mycoplasma pneumoniae | | CAUAUAAGGUAGAUUGGAUACG |
| | CasM.26 crRNA targeting | 407 | GCCACCCCAAAAAUGAAGGGGACUAAAA |
| | mycoplasma pneumoniae | | CAGGUUUGGGAGAUUCUCACUC |
| | CasM.26 crRNA targeting | 408 | GCCACCCCAAAAAUGAAGGGGACUAAAA |
| | mycoplasma pneumoniae | | CACGGUUUGGGAGAUUCUCACU |
| | CasM.26 crRNA targeting | 409 | GCCACCCCAAAAAUGAAGGGGACUAAAA |
| | mycoplasma pneumoniae | | CAACCGGGUUGAGGUGGGAAAC |
| | CasM.26 crRNA targeting | 410 | GCCACCCCAAAAAUGAAGGGGACUAAAA |
| | mycoplasma pneumoniae | | CACCCGGUAUGGCGCCUCGUCC |
| | CasM.26 crRNA targeting | 411 | GCCACCCCAAAAAUGAAGGGGACUAAAA |
| | human 18S | | CAGGUGACGGGGAAUCAGGGUU |
| | CasM.26 crRNA targeting | 412 | GCCACCCCAAAAAUGAAGGGGACUAAAA |
| | human 18S | | CAUGUCCGGGCCGGGUGAGGUU |
| | CasM.26 crRNA targeting | 413 | GCCACCCCAAAAAUGAAGGGGACUAAAA |
| | human 18S | | CAGGGCUGACCGGGUUGGUUUU |
| | CasM.26 crRNA targeting | 414 | GCCACCCCAAAAAUGAAGGGGACUAAAA |
| | human GAPDH | | CACGCCGCUGCGGGGUGGGCCC |
| | CasM.26 crRNA targeting | 415 | GCCACCCCAAAAAUGAAGGGGACUAAAA |
| | human GAPDH | | CAAGCCUGGGUGCGGGGCUCCG |
| | CasM.26 crRNA targeting | 416 | GCCACCCCAAAAAUGAAGGGGACUAAAA |
| | human GAPDH | | CAGUGUGUGGGGAGAAGGGAUG |
| | CasM.26 crRNA targeting | 417 | GCCACCCCAAAAAUGAAGGGGACUAAAA |
| | human HRPT1 | | CACAAAGUGCUGGGAUUACAGG |
| | CasM.26 crRNA targeting | 418 | GCCACCCCAAAAAUGAAGGGGACUAAAA |
| | human HRPT1 | | CACCCAGCACUUUGGGAGGCUG |
| | CasM.26 crRNA targeting | 419 | GCCACCCCAAAAAUGAAGGGGACUAAAA |
| | human HRPT1 | | CAAAAGUGCUGGGAUUACAGGC |
| | CasM.26 crRNA targeting | 420 | GCCACCCCAAAAAUGAAGGGGACUAAAA |
| | human GUSB | | CAGCCUCCCAAAGUGCUGGGAU |
| | CasM.26 crRNA targeting | 421 | GCCACCCCAAAAAUGAAGGGGACUAAAA |
| | human GUSB | | CAAGCACUUUGGGAGGCCAAGG |
| | CasM.26 crRNA targeting | 422 | GCCACCCCAAAAAUGAAGGGGACUAAAA |
| | human RNaseP | | CACUCCCCGAAGGGCGGGGUCC |
| | CasM.26 crRNA targeting | 423 | GCCACCCCAAAAAUGAAGGGGACUAAAA |
| | human RNaseP | | CAGCCCCUCCCCGAAGGGCGGG |
| | CasM.26 crRNA targeting | 424 | GCCACCCCAAAAAUGAAGGGGACUAAAA |
| | human RNaseP | | CAGGAGGCAUCCGCCGGGCCCC |
| | CasM.26 crRNA targeting | 425 | GCCACCCCAAAAAUGAAGGGGACUAAAA |
| | SARS-CoV-2 S-gene 156/157 | | CAUCUGAACUCACUUUCCAUCC |
| | WT | | |
| | CasM.26 crRNA targeting | 426 | GCCACCCCAAAAAUGAAGGGGACUAAAA |
| | SARS-CoV-2 S-gene | | CACCACGUUCCAUCCAACUUUU |
| | del 156/157 (delta variant) | | |
| | CasM.26 crRNA targeting | 427 | GCCACCCCAAAAAUGAAGGGGACUAAAA |
| | SARS-CoV-2 S-gene 241/243 | | CAGCAAGUAAAGUUUGAAACCU |
| | WT | | |
| | CasM.26 crRNA targeting | 428 | GCCACCCCAAAAAUGAAGGGGACUAAAA |
| | SARS-CoV-2 S-gene | | CAGUUUAAAACCUAGUGAUGUU |
| | del241/243 (beta variant) | | |
| | CasM.26 crRNA targeting | 429 | GCCACCCCAAAAAUGAAGGGGACUAAAA |
| | SARS-CoV-2 S-gene 69/70 WT | | CAACAUGUAUAGCAUGGAACCA |
| | CasM.26 crRNA targeting | 430 | GCCACCCCAAAAAUGAAGGGGACUAAAA |
| | SARS-CoV-2 S-gene del69/70 | | CAGAUAUCAUGGAACCAAGUAA |
| | (alpha variant) | | |
| | CasM.26 crRNA targeting | 431 | GCCACCCCAAAAAUGAAGGGGACUAAAA |
| | SARS-CoV-2 S-gene 144/145 | | CAUAAACACCCAAAAAUGGAUC |
| | WT | | |
| | CasM.26 crRNA targeting | 432 | GCCACCCCAAAAAUGAAGGGGACUAAAA |
| | SARS-CoV-2 S-gene | | CAGUAAACACCCAAAAAUGGAU |
| | del 144/145 (alpha variant) | | |
| | CasM.26 crRNA targeting | 433 | GCCACCCCAAAAAUGAAGGGGACUAAAA |
| | SARS-CoV-2 S-gene V1176 | | CAACUGAAGCAUUAAUGCCAGA |
| | WT | | |
| | CasM.26 crRNA targeting | 434 | GCCACCCCAAAAAUGAAGGGGACUAAAA |
| | SARS-CoV-2 S-gene V1176F | | CAAAGUAAGCAUUAAUGCCAGA |
| | (gamma variant) | | |
| | CasM.26 crRNA targeting | 435 | GCCACCCCAAAAAUGAAGGGGACUAAAA |
| | SARS-CoV-2 S-gene D614 WT | | CACAUCCUGAUAAAGAACAGCA |
| | CasM.26 crRNA targeting | 436 | GCCACCCCAAAAAUGAAGGGGACUAAAA |
| | SARS-CoV-2 S-gene D614G | | CACACCUUGAUAAAGAACAGCA |
| | (beta variant) | | |
| | CasM.26 crRNA targeting | 437 | GCCACCCCAAAAAUGAAGGGGACUAAAA |
| | SARS-CoV-2 S-gene T19 WT | | CAUUGUAAGAUUAACACACUGA |
| | CasM.26 crRNA targeting | 438 | GCCACCCCAAAAAUGAAGGGGACUAAAA |
| | SARS-CoV-2 S-gene T19R | | CAUUCUGAGAUUAACACACUGA |
| | (delta variant) | | |
| | CasM.26 crRNA targeting | 439 | GCCACCCCAAAAAUGAAGGGGACUAAAA |
| | SARS-CoV-2 S-gene D80 WT | | CAUAUCAAACCUCUUAGUACCA |
| | CasM.26 crRNA targeting | 440 | GCCACCCCAAAAAUGAAGGGGACUAAAA |
| | SARS-CoV-2 S-gene D80A | | CAUAGCGAACCUCUUAGUACCA |
| | (beta variant) | | |
| | CasM.26 crRNA targeting | 441 | GCCACCCCAAAAAUGAAGGGGACUAAAA |
| | SARS-CoV-2 S-gene D215 WT | | CAGAUCACGCACUAAAUUAAUA |
| | CasM.26 crRNA targeting | 442 | GCCACCCCAAAAAUGAAGGGGACUAAAA |
| | SARS-CoV-2 S-gene D215G | | CAGACCGCGCACUAAAUUAAUA |
| | (beta variant) | | |
| | CasM.26 crRNA targeting | 443 | GCCACCCCAAAAAUGAAGGGGACUAAAA |
| | SARS-CoV-2 S-gene E484 WT | | CAUUCAACACCAUUACAAGGUG |
| | CasM.26 crRNA targeting | 444 | GCCACCCCAAAAAUGAAGGGGACUAAAA |
| | SARS-CoV-2 S-gene E484K | | CAUUUAGCACCAUUACAAGGUG |
| | (gamma variant) | | |
| | CasM.26 crRNA targeting | 445 | GCCACCCCAAAAAUGAAGGGGACUAAAA |
| | SARS-CoV-2 S-gene P681 WT | | CAGAGGAGAAUUAGUCUGAGUC |
| | CasM.26 crRNA targeting | 446 | GCCACCCCAAAAAUGAAGGGGACUAAAA |
| | SARS-CoV-2 S-gene P681H | | CAGAUGGGAAUUAGUCUGAGUC |
| | (alpha variant) | | |
| | CasM.26 crRNA targeting | 447 | GCCACCCCAAAAAUGAAGGGGACUAAAA |
| | SARS-CoV-2 S-gene P681 WT | | CAGAGGGGAAUUAGUCUGAGUC |
| | CasM.26 crRNA targeting | 448 | GCCACCCCAAAAAUGAAGGGGACUAAAA |
| | SARS-CoV-2 S-gene P681R | | CAGACGUGAAUUAGUCUGAGUC |
| | (delta variant) | | |
| | CasM.26 crRNA targeting | 449 | GCCACCCCAAAAAUGAAGGGGACUAAAA |
| | SARS-CoV-2 S-gene A701 WT | | CACUGCACCAAGUGACAUAGUG |
| | CasM.26 crRNA targeting | 450 | GCCACCCCAAAAAUGAAGGGGACUAAAA |
| | SARS-CoV-2 S-gene A701V | | CACUACGCCAAGUGACAUAGUG |
| | (beta variant) | | |
| | CasM.26 crRNA targeting | 451 | GCCACCCCAAAAAUGAAGGGGACUAAAA |
| | SARS-CoV-2 S-gene T716 WT | | CAUUGUGGGUAUGGCAAUAGAG |
| | CasM.26 crRNA targeting | 452 | GCCACCCCAAAAAUGAAGGGGACUAAAA |
| | SARS-CoV-2 S-gene T716I | | CAUUAUUGGUAUGGCAAUAGAG |
| | (alpha variant) | | |
| | CasM.26 crRNA targeting | 453 | GCCACCCCAAAAAUGAAGGGGACUAAAA |
| | SARS-CoV-2 S-gene S982 WT | | CAUGAAAGGAUAUCAUUUAAAA |
| | CasM.26 crRNA targeting | 454 | GCCACCCCAAAAAUGAAGGGGACUAAAA |
| | SARS-CoV-2 S-gene S982A | | CAUGCACGGAUAUCAUUUAAAA |
| | (alpha variant) | | |
| | CasM.26 crRNA targeting | 455 | GCCACCCCAAAAAUGAAGGGGACUAAAA |
| | SARS-CoV-2 S-gene D1118 | | CAGUCUGUAGUAAUGAUUUGUG |
| | WT | | |
| | CasM.26 crRNA targeting | 456 | GCCACCCCAAAAAUGAAGGGGACUAAAA |
| | SARS-CoV-2 S-gene D1118H | | CAGUGUAUAGUAAUGAUUUGUG |
| | (alpha variant) | | |
| | CasM.26 crRNA targeting | 457 | GCCACCCCAAAAAUGAAGGGGACUAAAA |
| | SARS-CoV-2 S-gene A570 WT | | CACAGCAAUGUCUCUGCCAAAU |
| | CasM.26 crRNA targeting | 458 | GCCACCCCAAAAAUGAAGGGGACUAAAA |
| | SARS-CoV-2 S-gene A570D | | CACAUCGAUGUCUCUGCCAAAU |
| | (alpha variant) | | |
| | CasM.26 crRNA targeting | 459 | GCCACCCCAAAAAUGAAGGGGACUAAAA |
| | PSMB2 | | CACGGAGAGGAUUAUGGAAUGC |
| | CasM.26 crRNA targeting | 460 | GCCACCCCAAAAAUGAAGGGGACUAAAA |
| | PSMB2 | | CAAGUUAGGUUCGGAGAGGAUU |
| | CasM.26 crRNA targeting | 461 | GCCACCCCAAAAAUGAAGGGGACUAAAA |
| | PSMB2 | | CAAAGUGGGGAGUUAGGUUCGG |
| | CasM.26 crRNA targeting | 462 | GCCACCCCAAAAAUGAAGGGGACUAAAA |
| | RPL32 | | CACGGCCAUGAUGCCGAGAAGG |
| | CasM.26 crRNA targeting | 463 | GCCACCCCAAAAAUGAAGGGGACUAAAA |
| | RPL32 | | CAGGGCGGCCAUGAUGCCGAGA |
| | CasM.26 crRNA targeting | 464 | GCCACCCCAAAAAUGAAGGGGACUAAAA |
| | RPL32 | | CACAUGAUGCCGAGAAGGAGAU |
| | CasM.26 crRNA targeting | 465 | GCCACCCCAAAAAUGAAGGGGACUAAAA |
| | VPS29 | | CAUUCUCAUCGAAGUCUCCUCU |
| | CasM.26 crRNA targeting | 466 | GCCACCCCAAAAAUGAAGGGGACUAAAA |
| | VPS29 | | CAUCUCAUCGAAGUCUCCUCUC |
| | CasM.26 crRNA targeting | 467 | GCCACCCCAAAAAUGAAGGGGACUAAAA |
| | VPS29 | | CAGAUUCUCAUCGAAGUCUCCU |
| | CasM.26 crRNA targeting VCP | 468 | GCCACCCCAAAAAUGAAGGGGACUAAAA |
| | | | CAGCGACCAAAUCGCCGUAGAG |
| | CasM.26 crRNA targeting VCP | 469 | GCCACCCCAAAAAUGAAGGGGACUAAAA |
| | | | CAAAGCGACCAAAUCGCCGUAG |
| | CasM.26 crRNA targeting VCP | 470 | GCCACCCCAAAAAUGAAGGGGACUAAAA |
| | | | CAUGUCAAAGCGACCAAAUCGC |
| | CasM.26 crRNA targeting | 471 | GCCACCCCAAAAAUGAAGGGGACUAAAA |
| | SNRPD3 | | CAUUCCUCUUGCGGCCACUUGG |
| | CasM.26 crRNA targeting | 472 | GCCACCCCAAAAAUGAAGGGGACUAAAA |
| | SNRPD3 | | CAGCGGCCACUUGGGCCUUGAG |
| | CasM.26 crRNA targeting | 473 | GCCACCCCAAAAAUGAAGGGGACUAAAA |
| | SNRPD3 | | CACGGCCACUUGGGCCUUGAGA |
| | CasM.26 crRNA targeting GPI | 474 | GCCACCCCAAAAAUGAAGGGGACUAAAA |
| | | | CAACGGCUCGACCCUCGGUGUA |
| | CasM.26 crRNA targeting GPI | 475 | GCCACCCCAAAAAUGAAGGGGACUAAAA |
| | | | CACGGCUCGACCCUCGGUGUAG |
| | CasM.26 crRNA targeting GPI | 476 | GCCACCCCAAAAAUGAAGGGGACUAAAA |
| | | | CAUCGACCCUCGGUGUAGUUGA |
| | CasM.26 crRNA targeting | 477 | GCCACCCCAAAAAUGAAGGGGACUAAAA |
| | RPL13 | | CAUCUUAUAGACGUUCCGGACG |
| | CasM.26 crRNA targeting | 478 | GCCACCCCAAAAAUGAAGGGGACUAAAA |
| | RPL13 | | CAUAGACGUUCCGGACGGGCAU |
| | CasM.26 crRNA targeting | 479 | GCCACCCCAAAAAUGAAGGGGACUAAAA |
| | RPL13 | | CAUUAUAGACGUUCCGGACGGG |
| | CasM.26 crRNA targeting | 480 | GCCACCCCAAAAAUGAAGGGGACUAAAA |
| | RPL19 | | CAGAUACAUGUGGCGAUCGAUC |
| | CasM.26 crRNA targeting | 481 | GCCACCCCAAAAAUGAAGGGGACUAAAA |
| | RPL19 | | CAGUGAUACAUGUGGCGAUCGA |
| | CasM.26 crRNA targeting | 482 | GCCACCCCAAAAAUGAAGGGGACUAAAA |
| | RPL19 | | CACCGCUUACCUAUGCCCAUGU |
| | CasM.26 crRNA targeting | 483 | GCCACCCCAAAAAUGAAGGGGACUAAAA |
| | REEP5 | | CACCGAUGACACCAAGAGCGAU |
| | CasM.26 crRNA targeting | 484 | GCCACCCCAAAAAUGAAGGGGACUAAAA |
| | REEP5 | | CAGUCCGAUGACACCAAGAGCG |
| | CasM.26 crRNA targeting | 485 | GCCACCCCAAAAAUGAAGGGGACUAAAA |
| | REEP5 | | CAACGGUAGCUUUCUUCGCUUC |
| | CasM.26 crRNA targeting | 486 | GCCACCCCAAAAAUGAAGGGGACUAAAA |
| | RAB7A | | CAUCAAACGCGGCCGCUGCGCU |
| | CasM.26 crRNA targeting | 487 | GCCACCCCAAAAAUGAAGGGGACUAAAA |
| | RAB7A | | CAGGUCAUCCUUCAAACGCGGC |
| | CasM.26 crRNA targeting | 488 | GCCACCCCAAAAAUGAAGGGGACUAAAA |
| | RAB7A | | CACUUCAAACGCGGCCGCUGCG |
| | CasM.26 crRNA targeting | 489 | GCCACCCCAAAAAUGAAGGGGACUAAAA |
| | RPL31 | | CAGCGGGAGCCAUUCUGCAGCG |
| | CasM.26 crRNA targeting | 490 | GCCACCCCAAAAAUGAAGGGGACUAAAA |
| | RPL31 | | CAGGAGCCAUUCUGCAGCGUCC |
| | CasM.26 crRNA targeting | 491 | GCCACCCCAAAAAUGAAGGGGACUAAAA |
| | RPL31 | | CAGCCAUUCUGCAGCGUCCAAG |
| | CasM.26 crRNA targeting | 492 | GCCACCCCAAAAAUGAAGGGGACUAAAA |
| | RPL37A | | CAACGUUUGGCCAUGUCGCCGC |
| | CasM.26 crRNA targeting | 493 | GCCACCCCAAAAAUGAAGGGGACUAAAA |
| | RPL37A | | CAUACGUUUGGCCAUGUCGCCG |
| | CasM.26 crRNA targeting | 494 | GCCACCCCAAAAAUGAAGGGGACUAAAA |
| | RPL37A | | CAUUGGCCAUGUCGCCGCGACC |
| | CasM.26 crRNA targeting | 495 | GCCACCCCAAAAAUGAAGGGGACUAAAA |
| | RPL30 | | CAGGGACGGCCCCCAACCAACA |
| | CasM.26 crRNA targeting | 496 | GCCACCCCAAAAAUGAAGGGGACUAAAA |
| | RPL30 | | CAGACUCCAGCGACUUUUUCGU |
| | CasM.26 crRNA targeting | 497 | GCCACCCCAAAAAUGAAGGGGACUAAAA |
| | RPL30 | | CACGGCCCCCAACCAACAGCAG |
| | CasM.26 crRNA targeting | 498 | GCCACCCCAAAAAUGAAGGGGACUAAAA |
| | RPS6 | | CACGCUUCUCCUUAGCCUCCUU |
| | CasM.26 crRNA targeting | 499 | GCCACCCCAAAAAUGAAGGGGACUAAAA |
| | RPS6 | | CAUUCUCCUUAGCCUCCUUCAU |
| | CasM.26 crRNA targeting | 500 | GCCACCCCAAAAAUGAAGGGGACUAAAA |
| | RPS6 | | CAUCUCCUUAGCCUCCUUCAUU |
| | CasM.26 crRNA targeting | 501 | GCCACCCCAAAAAUGAAGGGGACUAAAA |
| | RPS29 | | CAAACAGACACGACAAGAGCGA |
| | CasM.26 crRNA targeting | 502 | GCCACCCCAAAAAUGAAGGGGACUAAAA |
| | RPS29 | | CAUGAACAGACACGACAAGAGC |
| | CasM.26 crRNA targeting | 503 | GCCACCCCAAAAAUGAAGGGGACUAAAA |
| | RPS29 | | CACACGACAAGAGCGAGAACCC |
| | CasM.26 crRNA targeting | 504 | GCCACCCCAAAAAUGAAGGGGACUAAAA |
| | RPL27A | | CAACUUUGUAGUAGCCCGAUCG |
| | CasM.26 crRNA targeting | 505 | GCCACCCCAAAAAUGAAGGGGACUAAAA |
| | RPL27A | | CAGUAGUAGCCCGAUCGCACCA |
| | CasM.26 crRNA targeting | 506 | GCCACCCCAAAAAUGAAGGGGACUAAAA |
| | RPL27A | | CAGCCUAUGCGGCCGUGGCCGU |
| | CasM.26 crRNA targeting | 507 | GCCACCCCAAAAAUGAAGGGGACUAAAA |
| | RPS10 | | CAUCUGGCAAGUCUCCGCCACU |
| | CasM.26 crRNA targeting | 508 | GCCACCCCAAAAAUGAAGGGGACUAAAA |
| | RPS10 | | CAUAGGCAUCAACAUCUGGCAA |
| | CasM.26 crRNA targeting | 509 | GCCACCCCAAAAAUGAAGGGGACUAAAA |
| | RPS10 | | CAACAUCUGGCAAGUCUCCGCC |
| | CasM.26 crRNA targeting | 510 | GCCACCCCAAAAAUGAAGGGGACUAAAA |
| | RPS27 | | CAGAGAUCCUUUGCGAGCGGGG |
| | CasM.26 crRNA targeting | 511 | GCCACCCCAAAAAUGAAGGGGACUAAAA |
| | RPS27 | | CAGAUCCUUUGCGAGCGGGGAG |
| | CasM.26 crRNA targeting | 512 | GCCACCCCAAAAAUGAAGGGGACUAAAA |
| | RPS27 | | CAUUGCGAGCGGGGAGAGCUCG |
| | CasM.26 crRNA targeting | 513 | GCCACCCCAAAAAUGAAGGGGACUAAAA |
| | ACTB | | CAAUGAUCUUGAUCUUCAUUGU |
| | CasM.26 crRNA targeting | 514 | GCCACCCCAAAAAUGAAGGGGACUAAAA |
| | ACTB | | CAACGCCCUGGUGCCUGGGGCG |
| | CasM.26 crRNA targeting | 515 | GCCACCCCAAAAAUGAAGGGGACUAAAA |
| | ACTB | | CAGCUGGCGGCGGGUGUGGACG |
| | CasM.26 crRNA targeting | 516 | GCCACCCCAAAAAUGAAGGGGACUAAAA |
| | ATP5PB | | CACCGAGUACAUAGGGUCCUGU |
| | CasM.26 crRNA targeting | 517 | GCCACCCCAAAAAUGAAGGGGACUAAAA |
| | ATP5PB | | CACGAGUACAUAGGGUCCUGUU |
| | CasM.26 crRNA targeting | 518 | GCCACCCCAAAAAUGAAGGGGACUAAAA |
| | ATP5PB | | CAAGAGGGGGCCGCUGUGGCGG |
| | CasM.26 crRNA targeting | 519 | GCCACCCCAAAAAUGAAGGGGACUAAAA |
| | NDUFB4 | | CAUUUUCGAUGAGCCCUCGGCG |
| | CasM.26 crRNA targeting | 520 | GCCACCCCAAAAAUGAAGGGGACUAAAA |
| | NDUFB4 | | CAGCAAGGCAGGAUUUUCGAUG |
| | CasM.26 crRNA targeting | 521 | GCCACCCCAAAAAUGAAGGGGACUAAAA |
| | NDUFB4 | | CAUUCGAUGAGCCCUCGGCGGU |
| | CasM.26 crRNA targeting | 522 | GCCACCCCAAAAAUGAAGGGGACUAAAA |
| | ATP5MG | | CAAGCAGCGUUCACCAGCGCCG |
| | CasM.26 crRNA targeting | 523 | GCCACCCCAAAAAUGAAGGGGACUAAAA |
| | ATP5MG | | CAGCGUUCACCAGCGCCGGGGU |
| | CasM.26 crRNA targeting | 524 | GCCACCCCAAAAAUGAAGGGGACUAAAA |
| | ATP5MG | | CACGAGUAAGUCACAGCAGCGU |
| | CasM.26 crRNA targeting | 525 | GCCACCCCAAAAAUGAAGGGGACUAAAA |
| | EMC7 | | CAGUCUUAAGGAAACCGACGUG |
| | CasM.26 crRNA targeting | 526 | GCCACCCCAAAAAUGAAGGGGACUAAAA |
| | EMC7 | | CAUCAUCAUAACCAUUGGGUUC |
| | CasM.26 crRNA targeting | 527 | GCCACCCCAAAAAUGAAGGGGACUAAAA |
| | EMC7 | | CAGACUGCUCCAUUUCCCGUCU |
| | CasM.26 crRNA targeting | 528 | GCCACCCCAAAAAUGAAGGGGACUAAAA |
| | C1orf43 | | CAAGACCCCUGUCCCAUAGCGG |
| | CasM.26 crRNA targeting | 529 | GCCACCCCAAAAAUGAAGGGGACUAAAA |
| | Clorf43 | | CACAUUCUGGCCAAAGACCCCU |
| | CasM.26 crRNA targeting | 530 | GCCACCCCAAAAAUGAAGGGGACUAAAA |
| | Clorf43 | | CAUGGCCAAAGACCCCUGUCCC |
| | CasM.26 crRNA targeting | 531 | GCCACCCCAAAAAUGAAGGGGACUAAAA |
| | PRDX1 | | CAUAAAAAGGCCCCUGAACGAG |
| | CasM.26 crRNA targeting | 532 | GCCACCCCAAAAAUGAAGGGGACUAAAA |
| | PRDX1 | | CAGAUAAAAAGGCCCCUGAACG |
| | CasM.26 crRNA targeting | 533 | GCCACCCCAAAAAUGAAGGGGACUAAAA |
| | PRDX1 | | CAAAAAGGCCCCUGAACGAGAU |
| | CasM.26 crRNA targeting | 534 | GCCACCCCAAAAAUGAAGGGGACUAAAA |
| | ATP5MF | | CAUCGUGCUCUCUUUGAAACGC |
| | CasM.26 crRNA targeting | 535 | GCCACCCCAAAAAUGAAGGGGACUAAAA |
| | ATP5MF | | CACACUGGUACUGGGGCCGGAC |
| | CasM.26 crRNA targeting | 536 | GCCACCCCAAAAAUGAAGGGGACUAAAA |
| | ATP5MF | | CACGGAGCCGCUCGUGCUCUCU |
| | CasM.26 crRNA targeting | 537 | GCCACCCCAAAAAUGAAGGGGACUAAAA |
| | NDUFB3 | | CAAUUGCGGCCCCAUGGAUCCC |
| | CasM.26 crRNA targeting | 538 | GCCACCCCAAAAAUGAAGGGGACUAAAA |
| | NDUFB3 | | CAAUCUCCAAGCUUCAUUGCGG |
| | CasM.26 crRNA targeting | 539 | GCCACCCCAAAAAUGAAGGGGACUAAAA |
| | NDUFB3 | | CAAAGCUUCAUUGCGGCCCCAU |
| | CasM.26 crRNA targeting | 540 | GCCACCCCAAAAAUGAAGGGGACUAAAA |
| | NDUFB8 | | CAGUGCCAGUGCAUCGGUUCAC |
| | CasM.26 crRNA targeting | 541 | GCCACCCCAAAAAUGAAGGGGACUAAAA |
| | NDUFB8 | | CAUCGGGUAGUCGCCAUACCCC |
| | CasM.26 crRNA targeting | 542 | GCCACCCCAAAAAUGAAGGGGACUAAAA |
| | NDUFB8 | | CACGCCAUACCCCAUGCCAUCA |
| | CasM.26 crRNA targeting | 543 | GCCACCCCAAAAAUGAAGGGGACUAAAA |
| | CHMP2A | | CAAGGUUCGACAGCUCAUCUGU |
| | CasM.26 crRNA targeting | 544 | GCCACCCCAAAAAUGAAGGGGACUAAAA |
| | CHMP2A | | CAUUGAGGGGAGGUUCGACAGC |
| | CasM.26 crRNA targeting | 545 | GCCACCCCAAAAAUGAAGGGGACUAAAA |
| | CHMP2A | | CAGGGGAGGUUCGACAGCUCAU |
| | CasM.26 crRNA targeting | 546 | GCCACCCCAAAAAUGAAGGGGACUAAAA |
| | ATP5ME | | CAGCGGCCGAGCUUGAUGAGCG |
| | CasM.26 crRNA targeting | 547 | GCCACCCCAAAAAUGAAGGGGACUAAAA |
| | ATP5ME | | CAGAGUAGCGGCCGAGCUUGAU |
| | CasM.26 crRNA targeting | 548 | GCCACCCCAAAAAUGAAGGGGACUAAAA |
| | ATP5ME | | CAAAUUGUAGCGCGUGGCUCCG |
| | CasM.26 crRNA targeting | 549 | GCCACCCCAAAAAUGAAGGGGACUAAAA |
| | PSMB4 | | CACGAUUUGAAACCGGUUGUAA |
| | CasM.26 crRNA targeting | 550 | GCCACCCCAAAAAUGAAGGGGACUAAAA |
| | PSMB4 | | CAGAAACCGGUUGUAAGAACGG |
| | CasM.26 crRNA targeting | 551 | GCCACCCCAAAAAUGAAGGGGACUAAAA |
| | PSMB4 | | CAGGGUUCUGGGUCCGCGUGAU |
| | CasM.26 crRNA targeting | 552 | GCCACCCCAAAAAUGAAGGGGACUAAAA |
| | YWHAG | | CAUGUCACGUUCUUCAUGGCCG |
| | CasM.26 crRNA targeting | 553 | GCCACCCCAAAAAUGAAGGGGACUAAAA |
| | YWHAG | | CACAUUCAGCUCUGUCACGUUC |
| | CasM.26 crRNA targeting | 554 | GCCACCCCAAAAAUGAAGGGGACUAAAA |
| | YWHAG | | CAUCUGUCACGUUCUUCAUGGC |
| | CasM.26 crRNA targeting 28S | 555 | GCCACCCCAAAAAUGAAGGGGACUAAAA |
| | rRNA | | CACACUCGGGGGGGGUUUCGGU |
| | CasM.26 crRNA targeting 28S | 556 | GCCACCCCAAAAAUGAAGGGGACUAAAA |
| | rRNA | | CACUCCGACGCACACCACACGC |
| | CasM.26 crRNA targeting 28S | 557 | GCCACCCCAAAAAUGAAGGGGACUAAAA |
| | rRNA | | CAGUGCGUCGGGUCUGCGAGAG |
| | CasM.26 crRNA targeting | 558 | GCCACCCCAAAAAUGAAGGGGACUAAAA |
| | AMR gene IMP | | CAAACGAAGUAUGAACAUAAAC |
| | CasM.26 crRNA targeting | 559 | GCCACCCCAAAAAUGAAGGGGACUAAAA |
| | AMR gene IMP | | CAAAACGAAGUAUGAACAUAAA |
| | CasM.26 crRNA targeting | 560 | GCCACCCCAAAAAUGAAGGGGACUAAAA |
| | AMR gene IMP | | CAAAUUUUUAAAUCUGGCAAAG |
| | CasM.26 crRNA targeting | 561 | GCCACCCCAAAAAUGAAGGGGACUAAAA |
| | AMR gene IMP | | CAUAGAUUGAGAAUUAAGCCAC |
| | CasM.26 crRNA targeting | 562 | GCCACCCCAAAAAUGAAGGGGACUAAAA |
| | AMR gene IMP | | CAAGAUUGAGAAUUAAGCCACU |
| | CasM.26 crRNA targeting | 563 | GCCACCCCAAAAAUGAAGGGGACUAAAA |
| | AMR gene IMP | | CAAUAGAUUGAGAAUUAAGCCA |
| | CasM.26 crRNA targeting | 564 | GCCACCCCAAAAAUGAAGGGGACUAAAA |
| | AMR gene CTX-M-1 | | CAUUUAGCCGCCGACGCUAAUA |
| | CasM.26 crRNA targeting | 565 | GCCACCCCAAAAAUGAAGGGGACUAAAA |
| | AMR gene CTX-M-1 | | CAAGUGGUAUCACGCGGAUCGC |
| | CasM.26 crRNA targeting | 566 | GCCACCCCAAAAAUGAAGGGGACUAAAA |
| | AMR gene CTX-M-1 | | CAGACGAUUUUAGCCGCCGACG |
| | CasM.26 crRNA targeting | 567 | GCCACCCCAAAAAUGAAGGGGACUAAAA |
| | AMR gene CTX-M-2 | | CACGCUGCCGGUUUUAUCGCCC |
| | CasM.26 crRNA targeting | 568 | GCCACCCCAAAAAUGAAGGGGACUAAAA |
| | AMR gene CTX-M-2 | | CACUGCCGGUUUUAUCGCCCAC |
| | CasM.26 crRNA targeting | 569 | GCCACCCCAAAAAUGAAGGGGACUAAAA |
| | AMR gene CTX-M-2 | | CAUUUCAGGGUCUGCGCCAUCG |
| | CasM.26 crRNA targeting | 570 | GCCACCCCAAAAAUGAAGGGGACUAAAA |
| | AMR gene CTX-M-25 | | CACGCGAUAUCAUUCGUCGUAC |
| | CasM.26 crRNA targeting | 571 | GCCACCCCAAAAAUGAAGGGGACUAAAA |
| | AMR gene CTX-M-25 | | CAAACCGCGAUAUCAUUCGUCG |
| | CasM.26 crRNA targeting | 572 | GCCACCCCAAAAAUGAAGGGGACUAAAA |
| | AMR gene CTX-M-25 | | CAAACGAGCGGCGCGCGACCUU |
| | CasM.26 crRNA targeting | 573 | GCCACCCCAAAAAUGAAGGGGACUAAAA |
| | AMR gene CTX-M-8 | | CAGCGAUGUCAUUCGUCGUACC |
| | CasM.26 crRNA targeting | 574 | GCCACCCCAAAAAUGAAGGGGACUAAAA |
| | AMR gene CTX-M-8 | | CAACGGCGAUGUCAUUCGUCGU |
| | CasM.26 crRNA targeting | 575 | GCCACCCCAAAAAUGAAGGGGACUAAAA |
| | AMR gene CTX-M-8 | | CAGACGAUUUUCGCGGCAGCCG |
| | CasM.26 crRNA targeting | 576 | GCCACCCCAAAAAUGAAGGGGACUAAAA |
| | AMR gene CTX-M-9 | | CACAGUCCACGACGUCGGUAAG |
| | CasM.26 crRNA targeting | 577 | GCCACCCCAAAAAUGAAGGGGACUAAAA |
| | AMR gene CTX-M-9 | | CACCACGACGUCGGUAAGCCGG |
| | CasM.26 crRNA targeting | 578 | GCCACCCCAAAAAUGAAGGGGACUAAAA |
| | AMR gene CTX-M-9 | | CAGACGUCGGUAAGCCGGCCCG |
| | CasM.26 crRNA targeting Lujo | 579 | GCCACCCCAAAAAUGAAGGGGACUAAAA |
| | mammarenavirus L segment | | CAUGAUGAGAGACUAGCUCCCC |
| | CasM.26 crRNA targeting Lujo | 580 | GCCACCCCAAAAAUGAAGGGGACUAAAA |
| | mammarenavirus L segment | | CAACUCCUGCAGCUUAUCUCAA |
| | CasM.26 crRNA targeting Lujo | 581 | GCCACCCCAAAAAUGAAGGGGACUAAAA |
| | mammarenavirus L segment | | CAGAAUGAACUCCUGCAGCUUA |
| | CasM.26 crRNA targeting Lujo | 582 | GCCACCCCAAAAAUGAAGGGGACUAAAA |
| | mammarenavirus S segment | | CAGCUUGUCGACAUCUUGUCUC |
| | CasM.26 crRNA targeting Lujo | 583 | GCCACCCCAAAAAUGAAGGGGACUAAAA |
| | mammarenavirus S segment | | CACUUCUGCGCUUGUCGACAUC |
| | CasM.26 crRNA targeting Lujo | 584 | GCCACCCCAAAAAUGAAGGGGACUAAAA |
| | mammarenavirus S segment | | CAGUCGACAUCUUGUCUCACAA |
| | CasM.26 crRNA targeting | 585 | GCCACCCCAAAAAUGAAGGGGACUAAAA |
| | Lassa mammarenavirus | | CACGCCCCCGUGACCCACCGCC |
| | CasM.26 crRNA targeting | 586 | GCCACCCCAAAAAUGAAGGGGACUAAAA |
| | Lassa mammarenavirus | | CAACGCCCCCGUGACCCACCGC |
| | CasM.26 crRNA targeting | 587 | GCCACCCCAAAAAUGAAGGGGACUAAAA |
| | Lassa mammarenavirus | | CAGGACGCCCCCGUGACCCACC |
| | CasM.26 crRNA targeting | 588 | GCCACCCCAAAAAUGAAGGGGACUAAAA |
| | Argentinian mammarenavirus | | CACGAUGGUUGGCCUUAUAUUG |
| | (Junin arenavirus) | | |
| | CasM.26 crRNA targeting | 589 | GCCACCCCAAAAAUGAAGGGGACUAAAA |
| | Argentinian mammarenavirus | | CAGUCUUUCUGGCGAUGGUUGG |
| | (Junin arenavirus) | | |
| | CasM.26 crRNA targeting | 590 | GCCACCCCAAAAAUGAAGGGGACUAAAA |
| | Argentinian mammarenavirus | | CAUGGCGAUGGUUGGCCUUAUA |
| | (Junin arenavirus) | | |
| | CasM.26 crRNA targeting | 591 | GCCACCCCAAAAAUGAAGGGGACUAAAA |
| | Machupo mammarenavirus | | CAAUCAAGAAUCGCCUAGGAUC |
| | CasM.26 crRNA targeting | 592 | GCCACCCCAAAAAUGAAGGGGACUAAAA |
| | Machupo mammarenavirus | | CAAAUUGAUGGAGCUUGCAUCA |
| | CasM.26 crRNA targeting | 593 | GCCACCCCAAAAAUGAAGGGGACUAAAA |
| | Machupo mammarenavirus | | CAGACAAUAACCUCCUGGCAUG |
| | CasM.26 crRNA targeting | 594 | GCCACCCCAAAAAUGAAGGGGACUAAAA |
| | Pseudorabies Virus | | CAAGGUCGCCGUUGAGGUCAUC |
| | CasM.26 crRNA targeting | 595 | GCCACCCCAAAAAUGAAGGGGACUAAAA |
| | Pseudorabies Virus | | CAGUCGCCGUUGAGGUCAUCGU |
| | CasM.26 crRNA targeting | 596 | GCCACCCCAAAAAUGAAGGGGACUAAAA |
| | Pseudorabies Virus | | CAUCGCCGUCGAGGUCGCCGUU |
| | CasM.26 crRNA targeting | 597 | GCCACCCCAAAAAUGAAGGGGACUAAAA |
| | Orthopox virus | | CAGUCUAUAGUCGAUUCACUAU |
| | CasM.26 crRNA targeting | 598 | GCCACCCCAAAAAUGAAGGGGACUAAAA |
| | Orthopox virus | | CAUAUAGUCGAUUCACUAUCUG |
| | CasM.26 crRNA targeting | 599 | GCCACCCCAAAAAUGAAGGGGACUAAAA |
| | Orthopox virus | | CAUAUGUCUAUAGUCGAUUCAC |
| | Cas12 Variant crRNA targeting | 600 | UAAUUUCUACUAAGUGUAGAUCGCGCGG |
| | Pseudorabies Virus | | AAUCGCAUCUACC |
| | Cas12 Variant crRNA targeting | 601 | UAAUUUCUACUAAGUGUAGAUUCUCCGU |
| | Pseudorabies Virus | | CCGCGCCGUUUUA |
| | Cas12 Variant crRNA targeting | 602 | UAAUUUCUACUAAGUGUAGAUGGGCCCA |
| | Pseudorabies Virus | | CGAUCGUCGUCCU |
| | Cas12 Variant crRNA targeting | 603 | UAAUUUCUACUAAGUGUAGAUGAGACG |
| | Orthopox virus | | UAACAAUGCACUAC |
| | Cas12 Variant crRNA targeting | 604 | UAAUUUCUACUAAGUGUAGAUGGACUA |
| | Orthopox virus | | GGGGAUGUUGAUAA |
| | Cas12 Variant crRNA targeting | 605 | UAAUUUCUACUAAGUGUAGAUUGUGAG |
| | Orthopox virus | | ACCAUCGAAGAGAG |
| | Cas12 Variant crRNA targeting | 606 | UAAUUUCUACUAAGUGUAGAUUAUGCGC |
| | AMR gene CTX-M-8 | | AGGCGAACGACGU |
| | Cas12 Variant crRNA targeting | 607 | UAAUUUCUACUAAGUGUAGAUUGGUAC |
| | AMR gene CTX-M-8 | | GACGAAUGACAUCG |
| | Cas12 Variant crRNA targeting | 608 | UAAUUUCUACUAAGUGUAGAUAUUGAC |
| | AMR gene CTX-M-8 | | ACCGCCGAUAACGC |
| | Cas12 Variant crRNA targeting | 609 | UAAUUUCUACUAAGUGUAGAUGCGCGGC |
| | AMR gene CTX-M-1 | | CGCGCUACAGUAC |
| | Cas12 Variant crRNA targeting | 610 | UAAUUUCUACUAAGUGUAGAUGCCAAAA |
| | AMR gene CTX-M-1 | | GAUCGUGCGCCGC |
| | Cas12 Variant crRNA targeting | 611 | UAAUUUCUACUAAGUGUAGAUCGUUGGC |
| | AMR gene CTX-M-1 | | GGCCCGGCUAGCG |
| | Cas12 Variant crRNA targeting | 612 | UAAUUUCUACUAAGUGUAGAUgaacgagcgg |
| | AMR gene CTX-M-25 | | cgcgcgacct |
| | Cas12 Variant crRNA targeting | 613 | UAAUUUCUACUAAGUGUAGAUUGGUAC |
| | AMR gene CTX-M-25 | | GACGAAUGAUAUCG |
| | Cas12 Variant crRNA targeting | 614 | UAAUUUCUACUAAGUGUAGAUaataaccgcga |
| | AMR gene CTX-M-25 | | tatcattcg |
| | Cas12 Variant crRNA targeting | 615 | UAAUUUCUACUAAGUGUAGAUGGGCCGG |
| | AMR gene CTX-M-9 | | CUUACCGACGUCG |
| | Cas12 Variant crRNA targeting | 616 | UAAUUUCUACUAAGUGUAGAUGGCGAU |
| | AMR gene CTX-M-9 | | GAUUCUCGCCGCUG |
| | Cas12 Variant crRNA targeting | 617 | UAAUUUCUACUAAGUGUAGAUACGACGU |
| | AMR gene CTX-M-9 | | CGGUAAGCCGGCC |
| | Cas12 Variant crRNA targeting | 618 | UAAUUUCUACUAAGUGUAGAUCCGCUGC |
| | AMR gene CTX-M-2 | | CGGUUUUAUCGCC |
| | Cas12 Variant crRNA targeting | 619 | UAAUUUCUACUAAGUGUAGAUGCGAUG |
| | AMR gene CTX-M-2 | | GCGCAGACCCUGAA |
| | Cas12 Variant crRNA targeting | 620 | UAAUUUCUACUAAGUGUAGAUGCGCUAC |
| | AMR gene CTX-M-2 | | CGGUAGUAUUGCC |
| | Cas12 Variant crRNA targeting | 621 | UAAUUUCUACUAAGUGUAGAUAAACGA |
| | AMR gene IMP | | AGUAUGAACAUAAA |
| | Cas12 Variant crRNA targeting | 622 | UAAUUUCUACUAAGUGUAGAUCAAACGA |
| | AMR gene IMP | | AGUAUGAACAUAA |
| | Cas12 Variant crRNA targeting | 623 | UAAUUUCUACUAAGUGUAGAUCAAUUU |
| | AMR gene IMP | | UUAAAUCUGGCAAA |
| | Cas12 Variant crRNA targeting | 624 | UAAUUUCUACUAAGUGUAGAUAGAAUU |
| | AMR gene IMP | | AAGCCACUCUAUUC |
| | Cas12 Variant crRNA targeting | 625 | UAAUUUCUACUAAGUGUAGAUAUAGCCG |
| | AMR gene IMP | | CGCUCCACAAACC |
| | Cas12 Variant crRNA targeting | 626 | UAAUUUCUACUAAGUGUAGAUUAUAGCC |
| | AMR gene IMP | | GCGCUCCACAAAC |
| | CasM.26 crRNA targeting | 627 | GCCACCCCAAAAAUGAAGGGGACUAAAA |
| | Stenotrophomonas maltophilia | | CACGUAUUGGCGAUGUAUCCGG |
| | alpha | | |
| | CasM.26 crRNA targeting | 628 | GCCACCCCAAAAAUGAAGGGGACUAAAA |
| | Stenotrophomonas maltophilia | | CAGCACUUCGAUUCGGGCGUCU |
| | alpha | | |
| | CasM.26 crRNA targeting | 629 | GCCACCCCAAAAAUGAAGGGGACUAAAA |
| | Stenotrophomonas maltophilia | | CACGUCUGCGAGUUGCCGUCAC |
| | alpha | | |
| | CasM.26 crRNA targeting | 630 | GCCACCCCAAAAAUGAAGGGGACUAAAA |
| | Stenotrophomonas maltophilia | | CACGUCAUUGACCGUGUUGCGG |
| | beta | | |
| | CasM.26 crRNA targeting | 631 | GCCACCCCAAAAAUGAAGGGGACUAAAA |
| | Stenotrophomonas maltophilia | | CAUUCGCCUCGUGUUCGGCUUC |
| | beta | | |
| | CasM.26 crRNA targeting | 632 | GCCACCCCAAAAAUGAAGGGGACUAAAA |
| | Stenotrophomonas maltophilia | | CAAUUGACCGUGUUGCGGCCGA |
| | beta | | |
| | CasM.26 crRNA targeting | 633 | GCCACCCCAAAAAUGAAGGGGACUAAAA |
| | Stenotrophomonas maltophilia | | CAGCUUGUACGCCCACCCAUAG |
| | gamma | | |
| | CasM.26 crRNA targeting | 634 | GCCACCCCAAAAAUGAAGGGGACUAAAA |
| | Stenotrophomonas maltophilia | | CACGGUGAUGCUUGUACGCCCA |
| | gamma | | |
| | CasM.26 crRNA targeting | 635 | GCCACCCCAAAAAUGAAGGGGACUAAAA |
| | Stenotrophomonas maltophilia | | CACUCUUCCCGACGUCCGCGCA |
| | gamma | | |
| | CasM.26 crRNA targeting | 636 | GCCACCCCAAAAAUGAAGGGGACUAAAA |
| | Staphylococcus aureus gyrA | | CACAACACGAUCCAUGAAAUCU |
| | CasM.26 crRNA targeting | 637 | GCCACCCCAAAAAUGAAGGGGACUAAAA |
| | Staphylococcus aureus gyrA | | CACUUACUUCAAUACGUCCAUC |
| | CasM.26 crRNA targeting | 638 | GCCACCCCAAAAAUGAAGGGGACUAAAA |
| | Staphylococcus aureus gyrA | | CAUCUUCAACACGAUCCAUGAA |
| | CasM.26 crRNA targeting | 639 | GCCACCCCAAAAAUGAAGGGGACUAAAA |
| | Staphylococcus aureus gyrB | | CAACGGUUUUCUACAACGUCAC |
| | CasM.26 crRNA targeting | 640 | GCCACCCCAAAAAUGAAGGGGACUAAAA |
| | Staphylococcus aureus gyrB | | CAAUCGCAUCUUCAAGUUUUAC |
| | CasM.26 crRNA targeting | 641 | GCCACCCCAAAAAUGAAGGGGACUAAAA |
| | Staphylococcus aureus gyrB | | CAGCUUCAAUCGCAUCUUCAAG |
| | CasM.26 crRNA targeting | 642 | GCCACCCCAAAAAUGAAGGGGACUAAAA |
| | Staphylococcus aureus | | CAAAUCAGCGUUGUCUUCGCUC |
| | thermonuclease | | |
| | CasM.26 crRNA targeting | 643 | GCCACCCCAAAAAUGAAGGGGACUAAAA |
| | Staphylococcus aureus | | CAGCGUUGUCUUCGCUCCAAAU |
| | thermonuclease | | |
| | CasM.26 crRNA targeting | 644 | GCCACCCCAAAAAUGAAGGGGACUAAAA |
| | Staphylococcus aureus | | CAAUUGACCUGAAUCAGCGUUG |
| | thermonuclease | | |
| | CasM.26 crRNA targeting | 645 | GCCACCCCAAAAAUGAAGGGGACUAAAA |
| | Mycobacterium tuberculosis | | CACGAGUGAAGGUUCCUCGCGU |
| | IS1081 | | |
| | CasM.26 crRNA targeting | 646 | GCCACCCCAAAAAUGAAGGGGACUAAAA |
| | Mycobacterium tuberculosis | | CAUCGCGUGAUCCUUCGGGUGG |
| | IS1081 | | |
| | CasM.26 crRNA targeting | 647 | GCCACCCCAAAAAUGAAGGGGACUAAAA |
| | Mycobacterium tuberculosis | | CAUGAAGGUUCCUCGCGUGAUC |
| | IS1081 | | |
| | CasM.26 crRNA targeting | 648 | GCCACCCCAAAAAUGAAGGGGACUAAAA |
| | Mycobacterium tuberculosis | | CAAGUUCGACCGGCGGGACGUC |
| | IS6110 | | |
| | CasM.26 crRNA targeting | 649 | GCCACCCCAAAAAUGAAGGGGACUAAAA |
| | Mycobacterium tuberculosis | | CAGGCGGGACGUCGCCGCAGUA |
| | IS6110 | | |
| | CasM.26 crRNA targeting | 650 | GCCACCCCAAAAAUGAAGGGGACUAAAA |
| | Mycobacterium tuberculosis | | CAAGCCUCGAGUUCGACCGGCG |
| | IS6110 | | |
| | Cas12 Variant crRNA targeting | 651 | UAAUUUCUACUAAGUGUAGAUGGACCAU |
| | Stenotrophomonas maltophilia | | CCGGUGAACCGCG |
| | alpha | | |
| | Cas12 Variant crRNA targeting | 652 | UAAUUUCUACUAAGUGUAGAUCUCUACC |
| | Stenotrophomonas maltophilia | | CCGAGUACCGCGC |
| | alpha | | |
| | Cas12 Variant crRNA targeting | 653 | UAAUUUCUACUAAGUGUAGAUUCCAUAU |
| | Stenotrophomonas maltophilia | | CGAAGGCGACCCG |
| | alpha | | |
| | Cas12 Variant crRNA targeting | 654 | UAAUUUCUACUAAGUGUAGAUGAGCGAC |
| | Stenotrophomonas maltophilia | | CAGUCGUGGACGG |
| | beta | | |
| | Cas12 Variant crRNA targeting | 655 | UAAUUUCUACUAAGUGUAGAUGUCCGUC |
| | Stenotrophomonas maltophilia | | GCCCGGUGCGAUC |
| | beta | | |
| | Cas12 Variant crRNA targeting | 656 | UAAUUUCUACUAAGUGUAGAUGGACAUC |
| | Stenotrophomonas maltophilia | | AUCCGCCGCUCGG |
| | beta | | |
| | Cas12 Variant crRNA targeting | 657 | UAAUUUCUACUAAGUGUAGAUCCGCCGG |
| | Stenotrophomonas maltophilia | | UGGGCCGUUUCAA |
| | gamma | | |
| | Cas12 Variant crRNA targeting | 658 | UAAUUUCUACUAAGUGUAGAUCCGACCG |
| | Stenotrophomonas maltophilia | | CCGACGAUCGCGC |
| | gamma | | |
| | Cas12 Variant crRNA targeting | 659 | UAAUUUCUACUAAGUGUAGAUCCGCGCA |
| | Stenotrophomonas maltophilia | | CCGACCCGCAUCA |
| | gamma | | |
| | Cas12 Variant crRNA targeting | 660 | UAAUUUCUACUAAGUGUAGAUGCACGUA |
| | Staphylococcus aureus gyrA | | UCGUUGGUGACGU |
| | Cas12 Variant crRNA targeting | 661 | UAAUUUCUACUAAGUGUAGAUUGCGAU |
| | Staphylococcus aureus gyrA | | GAGUGUUAUCGUUG |
| | Cas12 Variant crRNA targeting | 662 | UAAUUUCUACUAAGUGUAGAUAUGGUG |
| | Staphylococcus aureus gyrA | | CAUCAGGUAUCGCG |
| | Cas12 Variant crRNA targeting | 663 | UAAUUUCUACUAAGUGUAGAUAAGUAA |
| | Staphylococcus aureus gyrB | | CGGAUAACGGACGU |
| | Cas12 Variant crRNA targeting | 664 | UAAUUUCUACUAAGUGUAGAUGCGGUG |
| | Staphylococcus aureus gyrB | | GCGGAUACAAAGUA |
| | Cas12 Variant crRNA targeting | 665 | UAAUUUCUACUAAGUGUAGAUUAUCACU |
| | Staphylococcus aureus gyrB | | AUGAGGGCGGUAU |
| | Cas12 Variant crRNA targeting | 666 | UAAUUUCUACUAAGUGUAGAUAAGCGA |
| | Staphylococcus aureus | | UUGAUGGUGAUACG |
| | thermonuclease | | |
| | Cas12 Variant crRNA targeting | 667 | UAAUUUCUACUAAGUGUAGAUUAGUUC |
| | Staphylococcus aureus | | GUCAAGGCUUGGCU |
| | thermonuclease | | |
| | Cas12 Variant crRNA targeting | 668 | UAAUUUCUACUAAGUGUAGAUAAAGGG |
| | Staphylococcus aureus | | CAAUACGCAAAGAG |
| | thermonuclease | | |
| | Cas12 Variant crRNA targeting | 669 | UAAUUUCUACUAAGUGUAGAUAAUUGC |
| | Mycobacterium tuberculosis | | GAAGGGCGAACGCG |
| | IS6110 | | |
| | Cas12 Variant crRNA targeting | 670 | UAAUUUCUACUAAGUGUAGAUCCGCGAG |
| | Mycobacterium tuberculosis | | GGCCCCGAUGGUU |
| | IS6110 | | |
| | Cas12 Variant crRNA targeting | 671 | UAAUUUCUACUAAGUGUAGAUCAUCGAC |
| | Mycobacterium tuberculosis | | CUACUACGACCAC |
| | IS6110 | | |
| | Cas12 Variant crRNA targeting | 672 | UAAUUUCUACUAAGUGUAGAUUCAUCUU |
| | Mycobacterium tuberculosis | | AUCGACGCCGAGC |
| | IS1081 | | |
| | Cas12 Variant crRNA targeting | 673 | UAAUUUCUACUAAGUGUAGAUUCGCGUG |
| | Mycobacterium tuberculosis | | AUCCUUCGAAACG |
| | IS1081 | | |
| | Cas12 Variant crRNA targeting | 674 | UAAUUUCUACUAAGUGUAGAUGUGCCGC |
| | Mycobacterium tuberculosis | | AACCAUCGACGUC |
| | IS1081 | | |
| | CasM.26 crRNA targeting | 675 | GCCACCCCAAAAAUGAAGGGGACUAAAA |
| | Acinetobacter spp. 16S-23S | | CACCCAAACAGUCGAUGUUACC |
| | ribosomal RNA intergenic | | |
| | spacer | | |
| | CasM.26 crRNA targeting | 676 | GCCACCCCAAAAAUGAAGGGGACUAAAA |
| | Acinetobacter spp. 16S-23S | | CACGAUGUUACCUACAAGUUAG |
| | ribosomal RNA intergenic | | |
| | spacer | | |
| | CasM.26 crRNA targeting | 677 | GCCACCCCAAAAAUGAAGGGGACUAAAA |
| | Acinetobacter spp. 16S-23S | | CAUCACAUACCAAAACGCUUGA |
| | ribosomal RNA intergenic | | |
| | spacer | | |
| | CasM.26 crRNA targeting | 678 | GCCACCCCAAAAAUGAAGGGGACUAAAA |
| | Acinetobacter spp. 16S-23S | | CAGUGCACUUAAGCACCGUACA |
| | ribosomal RNA intergenic | | |
| | spacer | | |
| | CasM.26 crRNA targeting | 679 | GCCACCCCAAAAAUGAAGGGGACUAAAA |
| | Acinetobacter spp. 16S-23S | | CAAACAGUCGAUGUUACCUACA |
| | ribosomal RNA intergenic | | |
| | spacer | | |
| | CasM.26 crRNA targeting | 680 | GCCACCCCAAAAAUGAAGGGGACUAAAA |
| | Acinetobacter spp. 16S-23S | | CAAGUCGAUGUUACCUACAAGU |
| | ribosomal RNA intergenic | | |
| | spacer | | |
| | CasM.26 crRNA targeting | 681 | GCCACCCCAAAAAUGAAGGGGACUAAAA |
| | Acinetobacter spp. 16S-23S | | CAGCACCGUACAGCUUCAAUCU |
| | ribosomal RNA intergenic | | |
| | spacer | | |
| | CasM.26 crRNA targeting | 682 | GCCACCCCAAAAAUGAAGGGGACUAAAA |
| | Acinetobacter spp. 16S-23S | | CAUGCACUUAAGCACCGUACAG |
| | ribosomal RNA intergenic | | |
| | spacer | | |
| | CasM.26 crRNA targeting | 683 | GCCACCCCAAAAAUGAAGGGGACUAAAA |
| | Acinetobacter spp. 16S-23S | | CAUUAAGCACCGUACAGCUUCA |
| | ribosomal RNA intergenic | | |
| | spacer | | |
| | CasM.26 crRNA targeting | 684 | GCCACCCCAAAAAUGAAGGGGACUAAAA |
| | Acinetobacter spp. 16S-23S | | CAAAACAGUCGAUGUUACCUAC |
| | ribosomal RNA intergenic | | |
| | spacer | | |
| | CasM.26 crRNA targeting | 685 | GCCACCCCAAAAAUGAAGGGGACUAAAA |
| | Acinetobacter spp. 16S-23S | | CAUUCACAUACCAAAACGCUUG |
| | ribosomal RNA intergenic | | |
| | spacer | | |
| | CasM.26 crRNA targeting | 686 | GCCACCCCAAAAAUGAAGGGGACUAAAA |
| | Acinetobacter spp. 16S-23S | | CAACAACCCCAAACAGUCGAUG |
| | ribosomal RNA intergenic | | |
| | spacer | | |
| | CasM.26 crRNA targeting | 687 | GCCACCCCAAAAAUGAAGGGGACUAAAA |
| | Acinetobacter spp. 16S-23S | | CACGUGCGAUUCUUCAUCGCUA |
| | ribosomal RNA intergenic | | |
| | spacer | | |
| | CasM.26 crRNA targeting | 688 | GCCACCCCAAAAAUGAAGGGGACUAAAA |
| | Acinetobacter spp. 16S-23S | | CAUGUCCGUGCGAUUCUUCAUC |
| | ribosomal RNA intergenic | | |
| | spacer | | |
| | CasM.26 crRNA targeting | 689 | GCCACCCCAAAAAUGAAGGGGACUAAAA |
| | Acinetobacter spp. 16S-23S | | CAGAUUCUUCAUCGCUACUAUC |
| | ribosomal RNA intergenic | | |
| | spacer | | |
| | CasM.26 crRNA targeting | 687 | GCCACCCCAAAAAUGAAGGGGACUAAAA |
| | Acinetobacter spp. 16S-23S | | CACGUGCGAUUCUUCAUCGCUA |
| | ribosomal RNA intergenic | | |
| | spacer | | |
| | CasM.26 crRNA targeting | 690 | GCCACCCCAAAAAUGAAGGGGACUAAAA |
| | Acinetobacter spp. 16S-23S | | CAAGUGUUGUCCGUGCGAUUCU |
| | ribosomal RNA intergenic | | |
| | spacer | | |
| | CasM.26 crRNA targeting | 691 | GCCACCCCAAAAAUGAAGGGGACUAAAA |
| | Acinetobacter spp. 16S-23S | | CAUACAAGUGAGUGUUGUCCGU |
| | ribosomal RNA intergenic | | |
| | spacer | | |
| | CasM.26 crRNA targeting | 692 | GCCACCCCAAAAAUGAAGGGGACUAAAA |
| | Acinetobacter spp. 16S-23S | | CAGUCCGUGCGAUUCUUCAUCG |
| | ribosomal RNA intergenic | | |
| | spacer | | |
| | CasM.26 crRNA targeting | 693 | GCCACCCCAAAAAUGAAGGGGACUAAAA |
| | Acinetobacter spp. 16S-23S | | CACUACAAGUGAGUGUUGUCCG |
| | ribosomal RNA intergenic | | |
| | spacer | | |
| | CasM.26 crRNA targeting | 694 | GCCACCCCAAAAAUGAAGGGGACUAAAA |
| | Acinetobacter spp. 16S-23S | | CAGUCGUCAACACCUACAAGUG |
| | ribosomal RNA intergenic | | |
| | spacer | | |
| | CasM.26 crRNA targeting | 695 | GCCACCCCAAAAAUGAAGGGGACUAAAA |
| | Acinetobacter spp. 16S-23S | | CAAAGUGAGUGUUGUCCGUGCG |
| | ribosomal RNA intergenic | | |
| | spacer | | |
| | CasM.26 crRNA targeting | 696 | GCCACCCCAAAAAUGAAGGGGACUAAAA |
| | Acinetobacter spp. 16S-23S | | CAUGCGAUUCUUCAUCGCUACU |
| | ribosomal RNA intergenic | | |
| | spacer | | |
| | CasM.26 crRNA targeting | 697 | GCCACCCCAAAAAUGAAGGGGACUAAAA |
| | Acinetobacter spp. 16S-23S | | CAUUGUCCGUGCGAUUCUUCAU |
| | ribosomal RNA intergenic | | |
| | spacer | | |
| | CasM.26 crRNA targeting | 698 | GCCACCCCAAAAAUGAAGGGGACUAAAA |
| | Acinetobacter spp. 16S-23S | | CACGACGUUACCUACAAGUUAG |
| | ribosomal RNA intergenic | | |
| | spacer | | |
| | CasM.26 crRNA targeting | 699 | GCCACCCCAAAAAUGAAGGGGACUAAAA |
| | Acinetobacter spp. 16S-23S | | CAACCCCAAACAGUCGACGUUA |
| | ribosomal RNA intergenic | | |
| | spacer | | |
| | CasM.26 crRNA targeting | 700 | GCCACCCCAAAAAUGAAGGGGACUAAAA |
| | Acinetobacter spp. 16S-23S | | CACAAACAGUCGACGUUACCUA |
| | ribosomal RNA intergenic | | |
| | spacer | | |
| | CasM.26 crRNA targeting | 701 | GCCACCCCAAAAAUGAAGGGGACUAAAA |
| | Acinetobacter spp. 16S-23S | | CAGACGUUACCUACAAGUUAGU |
| | ribosomal RNA intergenic | | |
| | spacer | | |
| | CasM.26 crRNA targeting | 702 | GCCACCCCAAAAAUGAAGGGGACUAAAA |
| | Acinetobacter spp. 16S-23S | | CACAGUCGACGUUACCUACAAG |
| | ribosomal RNA intergenic | | |
| | spacer | | |
| | CasM.26 crRNA targeting | 703 | GCCACCCCAAAAAUGAAGGGGACUAAAA |
| | Acinetobacter spp. 16S-23S | | CAUAUACCAAAACGCUUGAUUC |
| | ribosomal RNA intergenic | | |
| | spacer | | |
| | CasM.26 crRNA targeting | 704 | GCCACCCCAAAAAUGAAGGGGACUAAAA |
| | Acinetobacter spp. 16S-23S | | CACAGUCGUUAUUACCUACAAG |
| | ribosomal RNA intergenic | | |
| | spacer | | |
| | CasM.26 crRNA targeting | 705 | GCCACCCCAAAAAUGAAGGGGACUAAAA |
| | Acinetobacter spp. 16S-23S | | CACCCAACAGUCGUUAUUACCU |
| | ribosomal RNA intergenic | | |
| | spacer | | |
| | CasM.26 crRNA targeting | 706 | GCCACCCCAAAAAUGAAGGGGACUAAAA |
| | Acinetobacter spp. 16S-23S | | CACAAUCUCUUACAGUUUGAAG |
| | ribosomal RNA intergenic | | |
| | spacer | | |
| | CasM.26 crRNA targeting | 707 | GCCACCCCAAAAAUGAAGGGGACUAAAA |
| | Proteus mirabilis rpoD | | CAACGGCUUGGGUGGCGUAAUU |
| | CasM.26 crRNA targeting | 708 | GCCACCCCAAAAAUGAAGGGGACUAAAA |
| | Proteus mirabilis rpoD | | CAGUAAUUUACGCAACGCUUUU |
| | CasM.26 crRNA targeting | 709 | GCCACCCCAAAAAUGAAGGGGACUAAAA |
| | Proteus mirabilis rpoD | | CAGCAACGCUUUUGCUUCAAUC |
| | CasM.26 crRNA targeting | 710 | GCCACCCCAAAAAUGAAGGGGACUAAAA |
| | Proteus vulgaris 16S | | CACUUCACCCCAGUCAUGAAUC |
| | CasM.26 crRNA targeting | 711 | GCCACCCCAAAAAUGAAGGGGACUAAAA |
| | Proteus vulgaris 16S | | CAAGUCAUGAAUCACAAAGUGG |
| | CasM.26 crRNA targeting | 712 | GCCACCCCAAAAAUGAAGGGGACUAAAA |
| | Proteus vulgaris 16S | | CACGACUUCACCCCAGUCAUGA |
| | CasM.26 crRNA targeting A. | 713 | GCCACCCCAAAAAUGAAGGGGACUAAAA |
| | pitti gyrB | | CAUAUCCGCAUUUAAAGCAUUC |
| | CasM.26 crRNA targeting A. | 714 | GCCACCCCAAAAAUGAAGGGGACUAAAA |
| | pitti gyrB | | CAUAAAGCAUUCUCUUCAAUGA |
| | CasM.26 crRNA targeting A. | 715 | GCCACCCCAAAAAUGAAGGGGACUAAAA |
| | pitti gyrB | | CAAGCAAGAGAACAUACGAUCU |
| | CasM.26 crRNA targeting | 716 | GCCACCCCAAAAAUGAAGGGGACUAAAA |
| | Enterobacter nimipressuralis | | CACUACCUUGUUACGACUUCAC |
| | 16S | | |
| | CasM.26 crRNA targeting | 717 | GCCACCCCAAAAAUGAAGGGGACUAAAA |
| | Enterobacter nimipressuralis | | CACCUACGGCUACCUUGUUACG |
| | 16S | | |
| | CasM.26 crRNA targeting | 718 | GCCACCCCAAAAAUGAAGGGGACUAAAA |
| | Enterobacter nimipressuralis | | CAAGGUUCCCCUACGGCUACCU |
| | 16S | | |
| | CasM.26 crRNA targeting | 719 | GCCACCCCAAAAAUGAAGGGGACUAAAA |
| | Bacillus anthracis pagA | | CACCGUUGGUACUAGUAUCCCC |
| | CasM.26 crRNA targeting | 720 | GCCACCCCAAAAAUGAAGGGGACUAAAA |
| | Bacillus anthracis pagA | | CAUGAUCCCGUUGGUACUAGUA |
| | CasM.26 crRNA targeting | 721 | GCCACCCCAAAAAUGAAGGGGACUAAAA |
| | Bacillus anthracis pagA | | CAGGGAUUACUUAUAUAUAACG |
| | CasM.26 crRNA targeting | 722 | GCCACCCCAAAAAUGAAGGGGACUAAAA |
| | Bacillus anthracis capB | | CACCACUCCAUAUACAAUCCGA |
| | CasM.26 crRNA targeting | 723 | GCCACCCCAAAAAUGAAGGGGACUAAAA |
| | Bacillus anthracis capB | | CAUCGAUUAAUGGCUCAGCUGC |
| | CasM.26 crRNA targeting | 724 | GCCACCCCAAAAAUGAAGGGGACUAAAA |
| | Bacillus anthracis capB | | CAAAUCAUAUCGAUUAAUGGCU |
| | CasM.26 crRNA targeting | 725 | GCCACCCCAAAAAUGAAGGGGACUAAAA |
| | Brucella spp. 23S | | CAUAGUACCGGUAAGCUGCAUG |
| | CasM.26 crRNA targeting | 726 | GCCACCCCAAAAAUGAAGGGGACUAAAA |
| | Brucella spp. 23S | | CAUAAGCUGCAUGCGUUGCCGC |
| | CasM.26 crRNA targeting | 727 | GCCACCCCAAAAAUGAAGGGGACUAAAA |
| | Brucella spp. 23S | | CAGGGAAUACUCGUUUUCAGGU |
| | CasM.26 crRNA targeting | 728 | GCCACCCCAAAAAUGAAGGGGACUAAAA |
| | Brucella spp. bcsp31 | | CACUUACGCGCAACGAUAUGGA |
| | CasM.26 crRNA targeting | 729 | GCCACCCCAAAAAUGAAGGGGACUAAAA |
| | Brucella spp. bcsp31 | | CAAUCGUUUCCGGGUAAAGCGU |
| | CasM.26 crRNA targeting | 730 | GCCACCCCAAAAAUGAAGGGGACUAAAA |
| | Brucella spp. bcsp31 | | CAUUGCAUCCUUACGCGCAACG |
| | CasM.26 crRNA targeting | 731 | GCCACCCCAAAAAUGAAGGGGACUAAAA |
| | Brucella spp. omp2a | | CAAGUAGGGCAGUAGGGCAGUA |
| | CasM.26 crRNA targeting | 732 | GCCACCCCAAAAAUGAAGGGGACUAAAA |
| | Brucella spp. omp2a | | CAUCGCACUUUUGGCUCGAAAA |
| | CasM.26 crRNA targeting | 733 | GCCACCCCAAAAAUGAAGGGGACUAAAA |
| | Brucella spp. omp2a | | CAGGGCAGUAGGGCAGUAGGGC |
| | CasM.26 crRNA targeting | 734 | GCCACCCCAAAAAUGAAGGGGACUAAAA |
| | Coxiella burnetii IS110 | | CAAUUUAUCCGCGGUGUUAAUC |
| | CasM.26 crRNA targeting | 735 | GCCACCCCAAAAAUGAAGGGGACUAAAA |
| | Coxiella burnetii IS110 | | CAGAUUUAUCCGCGGUGUUAAU |
| | CasM.26 crRNA targeting | 736 | GCCACCCCAAAAAUGAAGGGGACUAAAA |
| | Coxiella burnetii IS110 | | CAUUAUCCGCGGUGUUAAUCCC |
| | CasM.26 crRNA targeting | 737 | GCCACCCCAAAAAUGAAGGGGACUAAAA |
| | Francisella tularensis 16S | | CAACGGCUACCAUUGUUACGAC |
| | CasM.26 crRNA targeting | 738 | GCCACCCCAAAAAUGAAGGGGACUAAAA |
| | Francisella tularensis 16S | | CACCGCAGGUUCCCUACGGCUA |
| | CasM.26 crRNA targeting | 739 | GCCACCCCAAAAAUGAAGGGGACUAAAA |
| | Francisella tularensis 16S | | CAGGUUCCCUACGGCUACCAUU |
| | CasM.26 crRNA targeting | 740 | GCCACCCCAAAAAUGAAGGGGACUAAAA |
| | Rickettsia spp. 16S | | CACCAGUCGCUAAUUUUACCGU |
| | CasM.26 crRNA targeting | 741 | GCCACCCCAAAAAUGAAGGGGACUAAAA |
| | Rickettsia spp. 16S | | CAAUUUUACCGUGGUUGGCUGC |
| | CasM.26 crRNA targeting | 742 | GCCACCCCAAAAAUGAAGGGGACUAAAA |
| | Rickettsia spp. 16S | | CACUAACUCCCAUGGCGUGACG |
| | CasM.26 crRNA targeting | 743 | GCCACCCCAAAAAUGAAGGGGACUAAAA |
| | Rickettsia spp. 23S | | CACAAUCGAGCUAUUAGUAUCG |
| | CasM.26 crRNA targeting | 744 | GCCACCCCAAAAAUGAAGGGGACUAAAA |
| | Rickettsia spp. 23S | | CAAGUAUCGGUUAGCUACACAC |
| | CasM.26 crRNA targeting | 745 | GCCACCCCAAAAAUGAAGGGGACUAAAA |
| | Rickettsia spp. 23S | | CAUUCCACGGCUCUAAUGGGGA |
| | CasM.26 crRNA targeting | 746 | GCCACCCCAAAAAUGAAGGGGACUAAAA |
| | Rickettsia spp. 782 - 17K genus | | CAAGGUUGACGGCAUGCAUUAC |
| | common antigen | | |
| | CasM.26 crRNA targeting | 747 | GCCACCCCAAAAAUGAAGGGGACUAAAA |
| | Rickettsia spp. 782 - 17K genus | | CAGACGGCAUGCAUUACCAUAU |
| | common antigen | | |
| | CasM.26 crRNA targeting | 748 | GCCACCCCAAAAAUGAAGGGGACUAAAA |
| | Rickettsia spp. 782 - 17K genus | | CACCAUCAGGUUGACGGCAUGC |
| | common antigen | | |
| | CasM.26 crRNA targeting | 749 | GCCACCCCAAAAAUGAAGGGGACUAAAA |
| | Rickettsia spp. 783 - 17K genus | | CAGGACCGUUACAGGCUUGUAA |
| | common antigen | | |
| | CasM.26 crRNA targeting | 750 | GCCACCCCAAAAAUGAAGGGGACUAAAA |
| | Rickettsia spp. 783 - 17K genus | | CAGUUGCAAGAGCUAUAAUCAU |
| | common antigen | | |
| | CasM.26 crRNA targeting | 751 | GCCACCCCAAAAAUGAAGGGGACUAAAA |
| | Rickettsia spp. 783 - 17K genus | | CAGGCUUGUAACAUAGAAGUUG |
| | common antigen | | |
| | CasM.26 crRNA targeting | 752 | GCCACCCCAAAAAUGAAGGGGACUAAAA |
| | Yersinia pestis pMT1 | | CAUGGUUAGAUACGGUUACGGU |
| | CasM.26 crRNA targeting | 753 | GCCACCCCAAAAAUGAAGGGGACUAAAA |
| | Yersinia pestis pMT1 | | CAACGGUUACGGUUACAGCAUC |
| | CasM.26 crRNA targeting | 754 | GCCACCCCAAAAAUGAAGGGGACUAAAA |
| | Yersinia pestis pMT1 | | CAGGAGGGCAUAAUAGCCCUCC |
| | CasM.26 crRNA targeting | 755 | GCCACCCCAAAAAUGAAGGGGACUAAAA |
| | Yersinia pestis pCD1 | | CAUACCAGACGUGUCAUCUAGC |
| | CasM.26 crRNA targeting | 756 | GCCACCCCAAAAAUGAAGGGGACUAAAA |
| | Yersinia pestis pCD1 | | CAGACGUUGCAUCACUGAAUCA |
| | CasM.26 crRNA targeting | 757 | GCCACCCCAAAAAUGAAGGGGACUAAAA |
| | Yersinia pestis pCD1 | | CAACGUGUCAUCUAGCAGACGU |
| | CasM.26 crRNA targeting | 758 | GCCACCCCAAAAAUGAAGGGGACUAAAA |
| | Yersinia pestis pPCP1 | | CAGACCCGCCGUCACAGUAUAA |
| | CasM.26 crRNA targeting | 759 | GCCACCCCAAAAAUGAAGGGGACUAAAA |
| | Yersinia pestis pPCP1 | | CAGAUAUUGCAGACCCGCCGUC |
| | CasM.26 crRNA targeting | 760 | GCCACCCCAAAAAUGAAGGGGACUAAAA |
| | Yersinia pestis pPCP1 | | CAAUCUCCGCCAAUAGAGACAG |
| | Cas12 Variant crRNA targeting | 761 | UAAUUUCUACUAAGUGUAGAUAUAAGC |
| | Acinetobacter spp. | | GUGGGGUCACAAGU |
| | ACIN_PAN_1_19 | | |
| | Cas12 Variant crRNA targeting | 762 | UAAUUUCUACUAAGUGUAGAUGUCAGAC |
| | Acinetobacter spp. | | CCACCAUGACUUU |
| | ACIN_PAN_1_24 | | |
| | Cas12 Variant crRNA targeting | 763 | UAAUUUCUACUAAGUGUAGAUACUGAA |
| | Acinetobacter spp. | | UCAAGCGUUUUGGU |
| | ACIN_PAN_1_108 | | |
| | Cas12 Variant crRNA targeting | 764 | UAAUUUCUACUAAGUGUAGAUCGAGGU |
| | A. pittii gyrB | | UGUCGAUAACGCAA |
| | Cas12 Variant crRNA targeting | 765 | UAAUUUCUACUAAGUGUAGAUAUCGCGC |
| | A. pittii gyrB | | UGGCCAAGUGCAU |
| | Cas12 Variant crRNA targeting | 766 | UAAUUUCUACUAAGUGUAGAUCAGUUG |
| | A. pittii gyrB | | UAAAUGCGCUUUCA |
| | Cas12 Variant crRNA targeting | 767 | UAAUUUCUACUAAGUGUAGAUGCUACUG |
| | A. calcoaceticus gyrB | | AUCUUAGCGGCGG |
| | Cas12 Variant crRNA targeting | 768 | UAAUUUCUACUAAGUGUAGAUAUACCUA |
| | A. calcoaceticus gyrB | | GAGAUAGUGGACG |
| | Cas12 Variant crRNA targeting | 769 | UAAUUUCUACUAAGUGUAGAUUAGUUA |
| | A. calcoaceticus gyrB | | AUACCUAGAGAUAG |
| | Cas12 Variant crRNA targeting | 770 | UAAUUUCUACUAAGUGUAGAUGCUACUU |
| | Bacillus anthracis pagA | | CCGCUGAUAAUCA |
| | Cas12 Variant crRNA targeting | 771 | UAAUUUCUACUAAGUGUAGAUUCAAGCA |
| | Bacillus anthracis pagA | | CCCAUGGUGGUUA |
| | Cas12 Variant crRNA targeting | 772 | UAAUUUCUACUAAGUGUAGAUCAAGUU |
| | Bacillus anthracis pagA | | GUACUGGACCGAUU |
| | Cas12 Variant crRNA targeting | 773 | UAAUUUCUACUAAGUGUAGAUACGACUC |
| | Bacillus anthracis capB | | UACUUAAGUCGAA |
| | Cas12 Variant crRNA targeting | 774 | UAAUUUCUACUAAGUGUAGAUCUGACGA |
| | Bacillus anthracis capB | | GGAGCAACCGAUU |
| | Cas12 Variant crRNA targeting | 775 | UAAUUUCUACUAAGUGUAGAUGUACAUC |
| | Bacillus anthracis capB | | UGCGCGAAUGAUA |
| | Cas12 Variant crRNA targeting | 776 | UAAUUUCUACUAAGUGUAGAUGGGUUA |
| | Francisella tularensis tul4 | | UUAUUGUAUGCUGU |
| | Cas12 Variant crRNA targeting | 777 | UAAUUUCUACUAAGUGUAGAUGAAGCU |
| | Francisella tularensis tul4 | | UGUAUCAUGGCACU |
| | Cas12 Variant crRNA targeting | 778 | UAAUUUCUACUAAGUGUAGAUAGCCUGC |
| | Francisella tularensis tul4 | | CAUUGUAAUCUUA |
| | Cas12 Variant crRNA targeting | 779 | UAAUUUCUACUAAGUGUAGAUUAAAGCC |
| | Francisella tularensis fopA | | AUAAAAAACUACA |
| | Cas12 Variant crRNA targeting | 780 | UAAUUUCUACUAAGUGUAGAUAAUCAU |
| | Francisella tularensis fopA | | GUAGAAUACUUGAG |
| | Cas12 Variant crRNA targeting | 781 | UAAUUUCUACUAAGUGUAGAUGUGAACC |
| | Francisella tularensis fopA | | UGAAUGCCCUAAU |
| | Cas12 Variant crRNA targeting | 782 | UAAUUUCUACUAAGUGUAGAUGUACGCU |
| | Yersinia pestis pMT1 | | UACUCUUGGCGGC |
| | Cas12 Variant crRNA targeting | 783 | UAAUUUCUACUAAGUGUAGAUGUUCCGU |
| | Yersinia pestis pMT1 | | UAUCGCCAUUGCA |
| | Cas12 Variant crRNA targeting | 784 | UAAUUUCUACUAAGUGUAGAUUACAGA |
| | Yersinia pestis pMT1 | | UGCCGCGGGUGAUC |
| | Cas12 Variant crRNA targeting | 785 | UAAUUUCUACUAAGUGUAGAUAAUUGC |
| | Yersinia pestis pCD1 | | UCAAGAAAAUCCUA |
| | Cas12 Variant crRNA targeting | 786 | UAAUUUCUACUAAGUGUAGAUAAUACAC |
| | Yersinia pestis pCD1 | | AAUGGGAAUUGCG |
| | Cas12 Variant crRNA targeting | 787 | UAAUUUCUACUAAGUGUAGAUUUGCCAA |
| | Yersinia pestis pCD1 | | UAGAGUAAUUACU |
| | Cas12 Variant crRNA targeting | 788 | UAAUUUCUACUAAGUGUAGAUUAACUA |
| | Yersinia pestis pPCP1 | | UUCUGUCCGGGAGU |
| | Cas12 Variant crRNA targeting | 789 | UAAUUUCUACUAAGUGUAGAUCCGGGUC |
| | Yersinia pestis pPCP1 | | AGGUAAUAUGGAU |
| | Cas12 Variant crRNA targeting | 790 | UAAUUUCUACUAAGUGUAGAUUCCGGGA |
| | Yersinia pestis pPCP1 | | GUGCUAAUGCAGC |
| | Cas12 Variant crRNA targeting | 791 | UAAUUUCUACUAAGUGUAGAUACCGCAG |
| | Coxiella burnetii com1 | | GCGUGGCGAUAGC |
| | Cas12 Variant crRNA targeting | 792 | UAAUUUCUACUAAGUGUAGAUAUUUUU |
| | Coxiella burnetii com1 | | GGCGGCCAAUCGCA |
| | Cas12 Variant crRNA targeting | 793 | UAAUUUCUACUAAGUGUAGAUUUAGCCG |
| | Coxiella burnetii com1 | | GAACCUUGACCGC |
| | Cas12 Variant crRNA targeting | 794 | UAAUUUCUACUAAGUGUAGAUCCGCGGU |
| | Coxiella burnetii IS110 | | GUUAAUCCCACCG |
| | Cas12 Variant crRNA targeting | 795 | UAAUUUCUACUAAGUGUAGAUAGACGU |
| | Coxiella burnetii IS110 | | UCAAGCGCUGUUAA |
| | Cas12 Variant crRNA targeting | 796 | UAAUUUCUACUAAGUGUAGAUCAAAAG |
| | Coxiella burnetii IS110 | | AUGUUUUCCAGCUG |
| | Cas12 Variant crRNA targeting | 797 | UAAUUUCUACUAAGUGUAGAUGCACCUA |
| | Rickettsia spp. 782 - 17K genus | | GCGGUAGUAACAU |
| | common antigen | | |
| | Cas12 Variant crRNA targeting | 798 | UAAUUUCUACUAAGUGUAGAUGUACACU |
| | Rickettsia spp. 782 - 17K genus | | UCUUGGUGGCGCA |
| | common antigen | | |
| | Cas12 Variant crRNA targeting | 799 | UAAUUUCUACUAAGUGUAGAUCAGGUU |
| | Rickettsia spp. 782 - 17K genus | | GACGGCAUGCAUUA |
| | common antigen | | |
| | Cas12 Variant crRNA targeting | 800 | UAAUUUCUACUAAGUGUAGAUUCAUACC |
| | Rickettsia spp. 783 - 17K genus | | GCCCGGACCGUUA |
| | common antigen | | |
| | Cas12 Variant crRNA targeting | 801 | UAAUUUCUACUAAGUGUAGAUCAAGCCU |
| | Rickettsia spp. 783 - 17K genus | | GUAACGGUCCGGG |
| | common antigen | | |
| | Cas12 Variant crRNA targeting | 802 | UAAUUUCUACUAAGUGUAGAUCAGAACC |
| | Rickettsia spp. 783 - 17K genus | | UCAUUAUAAUUGA |
| | common antigen | | |
| | Cas12 Variant crRNA targeting | 803 | UAAUUUCUACUAAGUGUAGAUAUGCGA |
| | Brucella spp. bcsp31 | | UCAAGUCGGGCGCU |
| | Cas12 Variant crRNA targeting | 804 | UAAUUUCUACUAAGUGUAGAUUAUCGU |
| | Brucella spp. bcsp31 | | UGCGCGUAAGGAUG |
| | Cas12 Variant crRNA targeting | 805 | UAAUUUCUACUAAGUGUAGAUACGCGCA |
| | Brucella spp. bcsp31 | | ACGAUAUGGAUCG |
| | Cas12 Variant crRNA targeting | 806 | UAAUUUCUACUAAGUGUAGAUUUCACAC |
| | Brucella spp. omp2a | | UUUUCGGGAUGCG |
| | Cas12 Variant crRNA targeting | 807 | UAAUUUCUACUAAGUGUAGAUACUGCCC |
| | Brucella spp. omp2a | | UACUGCCCUACUG |
| | Cas12 Variant crRNA targeting | 808 | UAAUUUCUACUAAGUGUAGAUCACUUUU |
| | Brucella spp. omp2a | | GGCUCGAAAAUGC |
| | CasM.26 crRNA targeting | 809 | GCCACCCCAAAAAUGAAGGGGACUAAAA |
| | Proteus vulgaris rpoD | | CACUACGUAAUACUUCAGAACG |
| | CasM.26 crRNA targeting | 810 | GCCACCCCAAAAAUGAAGGGGACUAAAA |
| | Proteus vulgaris rpoD | | CAGUCAAGGAAGCUACGUAAUA |
| | CasM.26 crRNA targeting | 811 | GCCACCCCAAAAAUGAAGGGGACUAAAA |
| | Proteus vulgaris rpoD | | CAGUAAUACUUCAGAACGGCUU |
| | CasM.26 crRNA targeting | 812 | GCCACCCCAAAAAUGAAGGGGACUAAAA |
| | Proteus penneri rpoD | | CAAGCUGAAGCUACUUGUUACU |
| | CasM.26 crRNA targeting | 813 | GCCACCCCAAAAAUGAAGGGGACUAAAA |
| | Proteus penneri rpoD | | CAAGCUACUUGUUACUAAAGGU |
| | CasM.26 crRNA targeting | 814 | GCCACCCCAAAAAUGAAGGGGACUAAAA |
| | Proteus penneri rpoD | | CAUUGUUACUAAAGGUAAGGAG |
| | CasM.26 crRNA targeting | 815 | GCCACCCCAAAAAUGAAGGGGACUAAAA |
| | Proteus hauseri rpoD | | CAUCUAGGAAGCUACGUAAGAC |
| | CasM.26 crRNA targeting | 816 | GCCACCCCAAAAAUGAAGGGGACUAAAA |
| | Proteus hauseri rpoD | | CAGCGGCUAGGGUGGCGUAACU |
| | CasM.26 crRNA targeting | 817 | GCCACCCCAAAAAUGAAGGGGACUAAAA |
| | Proteus hauseri rpoD | | CAGCGUAACUUACGCAGUGCCU |
| | CasM.26 crRNA targeting A. | 818 | GCCACCCCAAAAAUGAAGGGGACUAAAA |
| | baumannii gyrB | | CACGCCCAUUAAGCAUGAGAAC |
| | CasM.26 crRNA targeting A. | 819 | GCCACCCCAAAAAUGAAGGGGACUAAAA |
| | baumannii gyrB | | CAGCAUGAGAACAUGCGAUCAG |
| | CasM.26 crRNA targeting A. | 820 | GCCACCCCAAAAAUGAAGGGGACUAAAA |
| | baumannii gyrB | | CAGCGAUCAGCUUCAAUUGCAU |
| | CasM.26 crRNA targeting A. | 821 | GCCACCCCAAAAAUGAAGGGGACUAAAA |
| | nosocomialis gyrB | | CAAGCAUGAGAACAUACGAUCU |
| | CasM.26 crRNA targeting A. | 822 | GCCACCCCAAAAAUGAAGGGGACUAAAA |
| | nosocomialis gyrB | | CAGUCAUCACCCAUUAAGCAUG |
| | CasM.26 crRNA targeting A. | 823 | GCCACCCCAAAAAUGAAGGGGACUAAAA |
| | nosocomialis gyrB | | CACACCCAUUAAGCAUGAGAAC |
| | CasM.26 crRNA targeting | 824 | GCCACCCCAAAAAUGAAGGGGACUAAAA |
| | Enterobacter cloacae dnaJ | | CACUUUCCUGCAGCUCUUUUAA |
| | CasM.26 crRNA targeting | 825 | GCCACCCCAAAAAUGAAGGGGACUAAAA |
| | Enterobacter cloacae dnaJ | | CAAGCUCUUUUAACAGCUGCUU |
| | CasM.26 crRNA targeting | 826 | GCCACCCCAAAAAUGAAGGGGACUAAAA |
| | Enterobacter cloacae dnaJ | | CAGAAGAAGCUUUUGGAGCGUG |
| | CasM.26 crRNA targeting | 827 | GCCACCCCAAAAAUGAAGGGGACUAAAA |
| | Enterobacter asburiae pyrG | | CAAUGCCCGUCACGUGGCGUUG |
| | CasM.26 crRNA targeting | 828 | GCCACCCCAAAAAUGAAGGGGACUAAAA |
| | Enterobacter asburiae pyrG | | CAGGUAGUCGCUGGCGGCCUUC |
| | CasM.26 crRNA targeting | 829 | GCCACCCCAAAAAUGAAGGGGACUAAAA |
| | Enterobacter asburiae pyrG | | CAUGCAAACAGCGGAUGCCCGU |
| | CasM.26 crRNA targeting | 830 | GCCACCCCAAAAAUGAAGGGGACUAAAA |
| | Enterobacter asburiae dnaJ | | CAAGCUCUCCUGCAGUUCUUUC |
| | CasM.26 crRNA targeting | 831 | GCCACCCCAAAAAUGAAGGGGACUAAAA |
| | Enterobacter asburiae dnaJ | | CAGCCAAAGCUCUCCUGCAGUU |
| | CasM.26 crRNA targeting | 832 | GCCACCCCAAAAAUGAAGGGGACUAAAA |
| | Enterobacter asburiae dnaJ | | CACUGCAGUUCUUUCAGCAGCU |
| | CasM.26 crRNA targeting | 829 | GCCACCCCAAAAAUGAAGGGGACUAAAA |
| | Enterobacter hormaechei pyrG | | CAUGCAAACAGCGGAUGCCCGU |
| | CasM.26 crRNA targeting | 833 | GCCACCCCAAAAAUGAAGGGGACUAAAA |
| | Enterobacter hormaechei pyrG | | CAAUGCCCGUCACGCGGCGUUG |
| | CasM.26 crRNA targeting | 834 | GCCACCCCAAAAAUGAAGGGGACUAAAA |
| | Enterobacter hormaechei pyrG | | CAGUGGAAUUGGCAGGCCACGA |
| | CasM.26 crRNA targeting | 835 | GCCACCCCAAAAAUGAAGGGGACUAAAA |
| | Enterobacter hormaechei dnaJ | | CAGGGUUAAAUCGUCGAAGAAU |
| | CasM.26 crRNA targeting | 836 | GCCACCCCAAAAAUGAAGGGGACUAAAA |
| | Enterobacter hormaechei dnaJ | | CAUUUCCUGAAGCUCUUUCAGC |
| | CasM.26 crRNA targeting | 837 | GCCACCCCAAAAAUGAAGGGGACUAAAA |
| | Enterobacter hormaechei dnaJ | | CACGUCGAAGAAUUUUUUGACG |
| | CasM.26 crRNA targeting | 829 | GCCACCCCAAAAAUGAAGGGGACUAAAA |
| | Enterobacter kobei pyrG | | CAUGCAAACAGCGGAUGCCCGU |
| | CasM.26 crRNA targeting | 833 | GCCACCCCAAAAAUGAAGGGGACUAAAA |
| | Enterobacter kobei pyrG | | CAAUGCCCGUCACGCGGCGUUG |
| | CasM.26 crRNA targeting | 838 | GCCACCCCAAAAAUGAAGGGGACUAAAA |
| | Enterobacter kobei pyrG | | CAACUGGCAGGCAACAAACCAU |
| | CasM.26 crRNA targeting | 839 | GCCACCCCAAAAAUGAAGGGGACUAAAA |
| | Enterobacter kobei dnaJ | | CAGGGUCAAGUCGUCGAAGAAU |
| | CasM.26 crRNA targeting | 840 | GCCACCCCAAAAAUGAAGGGGACUAAAA |
| | Enterobacter kobei dnaJ | | CAAGUCGUCGAAGAAUUUUUUG |
| | CasM.26 crRNA targeting | 841 | GCCACCCCAAAAAUGAAGGGGACUAAAA |
| | Enterobacter kobei dnaJ | | CAUGCAGCUCUUUCAGUAGCUG |
| | CasM.26 crRNA targeting | 827 | GCCACCCCAAAAAUGAAGGGGACUAAAA |
| | Enterobacter ludwigii pyrG | | CAAUGCCCGUCACGUGGCGUUG |
| | CasM.26 crRNA targeting | 829 | GCCACCCCAAAAAUGAAGGGGACUAAAA |
| | Enterobacter ludwigii pyrG | | CAUGCAAACAGCGGAUGCCCGU |
| | CasM.26 crRNA targeting | 842 | GCCACCCCAAAAAUGAAGGGGACUAAAA |
| | Enterobacter ludwigii pyrG | | CAAAUCGCUGGCGGCUUUCACA |
| | CasM.26 crRNA targeting | 843 | GCCACCCCAAAAAUGAAGGGGACUAAAA |
| | Enterobacter ludwigii dnaJ | | CAAACUUUCCUGCAGCUCUUUC |
| | CasM.26 crRNA targeting | 844 | GCCACCCCAAAAAUGAAGGGGACUAAAA |
| | Enterobacter ludwigii dnaJ | | CAGGCCGCCAAAACUUUCCUGC |
| | CasM.26 crRNA targeting | 845 | GCCACCCCAAAAAUGAAGGGGACUAAAA |
| | Enterobacter ludwigii dnaJ | | CAUGCAGCUCUUUCAGCAGCUG |
| | CasM.26 crRNA targeting | 846 | GCCACCCCAAAAAUGAAGGGGACUAAAA |
| | Enterobacter mori pyrG | | CAAUUGGCAGGCAACGAACCAU |
| | CasM.26 crRNA targeting | 847 | GCCACCCCAAAAAUGAAGGGGACUAAAA |
| | Enterobacter mori pyrG | | CACCCGUCGCGCGGCGUAGAAG |
| | CasM.26 crRNA targeting | 848 | GCCACCCCAAAAAUGAAGGGGACUAAAA |
| | Enterobacter mori pyrG | | CAAGUCGCUGGCGGCCUUCACA |
| | CasM.26 crRNA targeting | 849 | GCCACCCCAAAAAUGAAGGGGACUAAAA |
| | Enterobacter mori dnaJ | | CAACCAAAGCUUUCCUGCAGCU |
| | CasM.26 crRNA targeting | 850 | GCCACCCCAAAAAUGAAGGGGACUAAAA |
| | Enterobacter mori dnaJ | | CAUUUCUCACCCGUCGGGCCAC |
| | CasM.26 crRNA targeting | 851 | GCCACCCCAAAAAUGAAGGGGACUAAAA |
| | Enterobacter mori dnaJ | | CAAGCGCGUUAAAUCAUCGAAG |
| | Cas12 Variant crRNA targeting | 852 | UAAUUUCUACUAAGUGUAGAUGGGAUA |
| | A. baumannii gyrB | | CAGACGACGGUACC |
| | Cas12 Variant crRNA targeting | 853 | UAAUUUCUACUAAGUGUAGAUAGGUGG |
| | A. baumannii gyrB | | CUUACACGGCGUAG |
| | Cas12 Variant crRNA targeting | 854 | UAAUUUCUACUAAGUGUAGAUCAUUUA |
| | A. baumannii gyrB | | ACGAUUUACCGUGC |
| | Cas12 Variant crRNA targeting | 855 | UAAUUUCUACUAAGUGUAGAUCUGUGAC |
| | A. nosocomialis gyrB | | GAAAUUAUUGUCA |
| | Cas12 Variant crRNA targeting | 856 | UAAUUUCUACUAAGUGUAGAUUUCUUAC |
| | A. nosocomialis gyrB | | CAUUCUGCAUGCA |
| | Cas12 Variant crRNA targeting | 857 | UAAUUUCUACUAAGUGUAGAUGGGAUA |
| | A. nosocomialis gyrB | | CAGACGACGGUACU |
| | Cas12 Variant crRNA targeting | 858 | UAAUUUCUACUAAGUGUAGAUGUGGUG |
| | Enterobacter cloacae dnaJ | | GCCGCGGUCGUCAA |
| | Cas12 Variant crRNA targeting | 859 | UAAUUUCUACUAAGUGUAGAUCGCCGUC |
| | Enterobacter cloacae dnaJ | | CAGCAGGCGUGUC |
| | Cas12 Variant crRNA targeting | 860 | UAAUUUCUACUAAGUGUAGAUAUGACCA |
| | Enterobacter cloacae dnaJ | | GUACGGUCACGCA |
| | Cas12 Variant crRNA targeting | 861 | UAAUUUCUACUAAGUGUAGAUAGACCUG |
| | Enterobacter asburiae dnaJ | | UCCAACCUGUCAC |
| | Cas12 Variant crRNA targeting | 862 | UAAUUUCUACUAAGUGUAGAUCGCUGGA |
| | Enterobacter asburiae dnaJ | | AGAGUGUGACGUU |
| | Cas12 Variant crRNA targeting | 863 | UAAUUUCUACUAAGUGUAGAUACCUGCG |
| | Enterobacter asburiae dnaJ | | CUACAACAUGGAG |
| | Cas12 Variant crRNA targeting | 864 | UAAUUUCUACUAAGUGUAGAUAAGAAC |
| | Enterobacter asburiae pyrG | | GCAUUGUUGCGGGU |
| | Cas12 Variant crRNA targeting | 865 | UAAUUUCUACUAAGUGUAGAUUGGUGA |
| | Enterobacter asburiae pyrG | | CUACCUGGGUGCAA |
| | Cas12 Variant crRNA targeting | 866 | UAAUUUCUACUAAGUGUAGAUGCCACUA |
| | Enterobacter asburiae pyrG | | CGAGCGUUUCAUC |
| | Cas12 Variant crRNA targeting | 867 | UAAUUUCUACUAAGUGUAGAUUUAAAG |
| | Enterobacter hormaechei pyrG | | AGCGUGUCCUUGCC |
| | Cas12 Variant crRNA targeting | 866 | UAAUUUCUACUAAGUGUAGAUGCCACUA |
| | Enterobacter hormaechei pyrG | | CGAGCGUUUCAUC |
| | Cas12 Variant crRNA targeting | 868 | UAAUUUCUACUAAGUGUAGAUUGCAGG |
| | Enterobacter hormaechei pyrG | | UCAUCCCACACAUC |
| | Cas12 Variant crRNA targeting | 869 | UAAUUUCUACUAAGUGUAGAUACCGUAA |
| | Enterobacter hormaechei dnaJ | | UCAGGGUGACAAA |
| | Cas12 Variant crRNA targeting | 870 | UAAUUUCUACUAAGUGUAGAUCAACAUG |
| | Enterobacter hormaechei dnaJ | | GAGCUGACGCUUG |
| | Cas12 Variant crRNA targeting | 871 | UAAUUUCUACUAAGUGUAGAUAUGAUC |
| | Enterobacter hormaechei dnaJ | | AGUACGGUCACGCG |
| | Cas12 Variant crRNA targeting | 872 | UAAUUUCUACUAAGUGUAGAUAGGUUA |
| | Enterobacter kobei pyrG | | UCCCACACAUCACU |
| | Cas12 Variant crRNA targeting | 873 | UAAUUUCUACUAAGUGUAGAUCGACUGG |
| | Enterobacter kobei pyrG | | CCGCAUCUACUCC |
| | Cas12 Variant crRNA targeting | 874 | UAAUUUCUACUAAGUGUAGAUGUACAUC |
| | Enterobacter kobei pyrG | | AACGUCGAUCCUG |
| | Cas12 Variant crRNA targeting | 875 | UAAUUUCUACUAAGUGUAGAUCAGUACA |
| | Enterobacter kobei dnaJ | | GCAGGCCUGUCCU |
| | Cas12 Variant crRNA targeting | 876 | UAAUUUCUACUAAGUGUAGAUCGGUGUC |
| | Enterobacter kobei dnaJ | | ACCAAAGAGAUCC |
| | Cas12 Variant crRNA targeting | 877 | UAAUUUCUACUAAGUGUAGAUAUUUCA |
| | Enterobacter kobei dnaJ | | GCGACAUCUUCGGC |
| | Cas12 Variant crRNA targeting | 878 | UAAUUUCUACUAAGUGUAGAUUGGUGA |
| | Enterobacter ludwigii pyrG | | UUAUCUUGGUGCUA |
| | Cas12 Variant crRNA targeting | 879 | UAAUUUCUACUAAGUGUAGAUUUGCGG |
| | Enterobacter ludwigii pyrG | | GCGGCGAAGGCCAC |
| | Cas12 Variant crRNA targeting | 880 | UAAUUUCUACUAAGUGUAGAUUCCGCAC |
| | Enterobacter ludwigii pyrG | | UAAAAUGACCCGU |
| | Cas12 Variant crRNA targeting | 881 | UAAUUUCUACUAAGUGUAGAUACCUGCG |
| | Enterobacter ludwigii dnaJ | | CUACAACAUGGAU |
| | Cas12 Variant crRNA targeting | 882 | UAAUUUCUACUAAGUGUAGAUCGAACAA |
| | Enterobacter ludwigii dnaJ | | GGCGGCAUGGGCG |
| | Cas12 Variant crRNA targeting | 883 | UAAUUUCUACUAAGUGUAGAUCGGCGAC |
| | Enterobacter ludwigii dnaJ | | AUUUUUGGCGGCG |
| | Cas12 Variant crRNA targeting | 884 | UAAUUUCUACUAAGUGUAGAUAUUGGC |
| | Enterobacter mori pyrG | | AGGCAACGAACCAU |
| | Cas12 Variant crRNA targeting | 885 | UAAUUUCUACUAAGUGUAGAUCCCGUCG |
| | Enterobacter mori pyrG | | CGCGGCGUAGAAG |
| | Cas12 Variant crRNA targeting | 886 | UAAUUUCUACUAAGUGUAGAUAGUCGCU |
| | Enterobacter mori pyrG | | GGCGGCCUUCACA |
| | Cas12 Variant crRNA targeting | 887 | UAAUUUCUACUAAGUGUAGAUACCAAAG |
| | Enterobacter mori dnaJ | | CUUUCCUGCAGCU |
| | Cas12 Variant crRNA targeting | 888 | UAAUUUCUACUAAGUGUAGAUAGCGCGU |
| | Enterobacter mori dnaJ | | UAAAUCAUCGAAG |
| | Cas12 Variant crRNA targeting | 889 | UAAUUUCUACUAAGUGUAGAUUUUCUCA |
| | Enterobacter mori dnaJ | | CCCGUCGGGCCAC |
| | CasM.26 crRNA targeting | 890 | GCCACCCCAAAAAUGAAGGGGACUAAAA |
| | Coronavirus 229E | | CAGCUCGUCAAUGCGAUCUUUG |
| | CasM.26 crRNA targeting | 891 | GCCACCCCAAAAAUGAAGGGGACUAAAA |
| | Coronavirus HKU1 | | CAAAAUUUCUUGUAAAGAAGAA |
| | CasM.26 crRNA targeting | 892 | GCCACCCCAAAAAUGAAGGGGACUAAAA |
| | Coronavirus OC43 | | CAGAGUGCCUUAUCUCGACUUU |
| | CasM.26 crRNA targeting | 893 | GCCACCCCAAAAAUGAAGGGGACUAAAA |
| | hMPV | | CACAUCACAUCUUUCCAUGUUA |
| | CasM.26 crRNA targeting | 894 | GCCACCCCAAAAAUGAAGGGGACUAAAA |
| | Rhinovirus EN71 | | CAUAGUCGGUUCCGCUGCAGAG |
| | CasM.26 crRNA targeting | 895 | GCCACCCCAAAAAUGAAGGGGACUAAAA |
| | Rhinovirus ENA | | CAACGGACACCCAAAGUAGUCG |
| | CasM.26 crRNA targeting | 896 | GCCACCCCAAAAAUGAAGGGGACUAAAA |
| | Rhinovirus ENB | | CACCAAAGUAGUCGGUUCCGCU |
| | CasM.26 crRNA targeting | 897 | GCCACCCCAAAAAUGAAGGGGACUAAAA |
| | Rhinovirus ENC | | CAAGGAAACACGGACACCCAAA |
| | CasM.26 crRNA targeting | 895 | GCCACCCCAAAAAUGAAGGGGACUAAAA |
| | Rhinovirus END | | CAACGGACACCCAAAGUAGUCG |
| | CasM.26 crRNA targeting | 898 | GCCACCCCAAAAAUGAAGGGGACUAAAA |
| | Influenza A | | CAUGUUGACGAUGGUCAUUUUG |
| | CasM.26 crRNA targeting | 899 | GCCACCCCAAAAAUGAAGGGGACUAAAA |
| | Influenza B | | CAUUGAAGUGUACAGCAGGCAG |
| | CasM.26 crRNA targeting RSV | 900 | GCCACCCCAAAAAUGAAGGGGACUAAAA |
| | | | CAGACUUGAGAUAUUGAUGCAU |
| | CasM.26 crRNA targeting | 901 | GCCACCCCAAAAAUGAAGGGGACUAAAA |
| | Parainfluenza virus HPIV1 | | CAACAAGUAGUGCUGGUCUAAG |
| | CasM.26 crRNA targeting | 902 | GCCACCCCAAAAAUGAAGGGGACUAAAA |
| | Parainfluenza virus HPIV2 | | CAACAAGAUGGCCUACAUUGGC |
| | CasM.26 crRNA targeting | 903 | GCCACCCCAAAAAUGAAGGGGACUAAAA |
| | Parainfluenza virus HPIV3 | | CAGAAAAACUUAGGAUUAAAGA |
| | CasM.26 crRNA targeting | 904 | GCCACCCCAAAAAUGAAGGGGACUAAAA |
| | Parainfluenza virus HPIV4a | | CAUUAGCUGCUUACGAACAGUU |
| | CasM.26 crRNA targeting | 905 | GCCACCCCAAAAAUGAAGGGGACUAAAA |
| | Parainfluenza virus HPIV4b | | CAUAGACCCACAAGAUUAUACA |
| | CasM.26 crRNA targeting | 906 | GCCACCCCAAAAAUGAAGGGGACUAAAA |
| | Nocardia 16S | | CAGACUCCAACUUCACGGGGUC |
| | CasM.26 crRNA targeting | 907 | GCCACCCCAAAAAUGAAGGGGACUAAAA |
| | Nocardia 16S | | CAAACUUCACGGGGUCGAGUUG |
| | CasM.26 crRNA targeting | 908 | GCCACCCCAAAAAUGAAGGGGACUAAAA |
| | Nocardia 16S | | CAUAGCGACUCCAACUUCACGG |
| | CasM.26 crRNA targeting | 909 | GCCACCCCAAAAAUGAAGGGGACUAAAA |
| | Nocardia hsp65 | | CAUCCAUGGCCUCGGCGAUCAG |
| | CasM.26 crRNA targeting | 910 | GCCACCCCAAAAAUGAAGGGGACUAAAA |
| | Nocardia hsp65 | | CAUGUCCAUGGCCUCGGCGAUC |
| | CasM.26 crRNA targeting | 911 | GCCACCCCAAAAAUGAAGGGGACUAAAA |
| | Nocardia hsp65 | | CAGAUCAGCUCACCGAUGGACG |
| | CasM.26 crRNA targeting | 912 | GCCACCCCAAAAAUGAAGGGGACUAAAA |
| | Nocardia gyrB | | CAUAGGGGACGGUGUCGUCGUU |
| | CasM.26 crRNA targeting | 913 | GCCACCCCAAAAAUGAAGGGGACUAAAA |
| | Nocardia gyrB | | CACGGCUGGAGAAGAUCUUCCC |
| | CasM.26 crRNA targeting | 914 | GCCACCCCAAAAAUGAAGGGGACUAAAA |
| | Nocardia gyrB | | CAGGCGAAGAAGCCGUAGUAGC |
| | CasM.26 crRNA targeting | 915 | GCCACCCCAAAAAUGAAGGGGACUAAAA |
| | Nocardia secA1 | | CAAGGAUGGAGUCGACCUCGUC |
| | CasM.26 crRNA targeting | 916 | GCCACCCCAAAAAUGAAGGGGACUAAAA |
| | Nocardia secA1 | | CAGAUGUCGACCUCGUAGUGCA |
| | CasM.26 crRNA targeting | 917 | GCCACCCCAAAAAUGAAGGGGACUAAAA |
| | Nocardia secA1 | | CAUCGACCUCGUCGACCACGGC |
| | CasM.26 crRNA targeting | 918 | GCCACCCCAAAAAUGAAGGGGACUAAAA |
| | Nocardia sodA | | CAUGCUCCCACAUGUCGACCUG |
| | CasM.26 crRNA targeting | 919 | GCCACCCCAAAAAUGAAGGGGACUAAAA |
| | Nocardia sodA | | CAGAAGGUCAGCAGCUUCUGGC |
| | CasM.26 crRNA targeting | 920 | GCCACCCCAAAAAUGAAGGGGACUAAAA |
| | Nocardia sodA | | CAGCUGGAAGGUCAGCAGCUUC |
| | CasM.26 crRNA targeting | 921 | GCCACCCCAAAAAUGAAGGGGACUAAAA |
| | Cryptococcus 18S | | CACGCCAAUCCGGAGAUCUCAC |
| | CasM.26 crRNA targeting | 922 | GCCACCCCAAAAAUGAAGGGGACUAAAA |
| | Cryptococcus 18S | | CAUCAACGCGAGCUGGUGACUC |
| | CasM.26 crRNA targeting | 923 | GCCACCCCAAAAAUGAAGGGGACUAAAA |
| | Cryptococcus 18S | | CAGACUCACGCUUACUAGGUAU |
| | CasM.26 crRNA targeting | 924 | GCCACCCCAAAAAUGAAGGGGACUAAAA |
| | Cryptococcus URA5 | | CACUCGUCCCGGGAUUGAACCG |
| | CasM.26 crRNA targeting | 925 | GCCACCCCAAAAAUGAAGGGGACUAAAA |
| | Cryptococcus URA5 | | CACGAAACGGCUAUGCCACCGA |
| | CasM.26 crRNA targeting | 926 | GCCACCCCAAAAAUGAAGGGGACUAAAA |
| | Cryptococcus URA5 | | CAUCGGUGGCAUAGCCGUUUCG |
| | CasM.26 crRNA targeting | 927 | GCCACCCCAAAAAUGAAGGGGACUAAAA |
| | Cryptococcus ITS | | CAGCGAAACUUAUUACGCCGGG |
| | CasM.26 crRNA targeting | 928 | GCCACCCCAAAAAUGAAGGGGACUAAAA |
| | Cryptococcus ITS | | CAACUUAUUACGCCGGGCUGAC |
| | CasM.26 crRNA targeting | 929 | GCCACCCCAAAAAUGAAGGGGACUAAAA |
| | Cryptococcus ITS | | CAUAAGGCGAGCCGACGUCCUU |
| | CasM.26 crRNA targeting | 930 | GCCACCCCAAAAAUGAAGGGGACUAAAA |
| | Cryptococcus 28S | | CAGACGGGUCGUUUAAAGCCAU |
| | CasM.26 crRNA targeting | 931 | GCCACCCCAAAAAUGAAGGGGACUAAAA |
| | Cryptococcus 28S | | CAUCGAACGUGGGCGAACCCCG |
| | CasM.26 crRNA targeting | 932 | GCCACCCCAAAAAUGAAGGGGACUAAAA |
| | Cryptococcus 28S | | CAUGGGCGAACCCCGGCCAUAA |
| | CasM.26 crRNA targeting | 933 | GCCACCCCAAAAAUGAAGGGGACUAAAA |
| | Cryptococcus CTX1 | | CAGGUCAACCUCGCAUAUUCGA |
| | CasM.26 crRNA targeting | 934 | GCCACCCCAAAAAUGAAGGGGACUAAAA |
| | Cryptococcus CTX1 | | CACGCAUAUUCGAGGUACAACC |
| | CasM.26 crRNA targeting | 935 | GCCACCCCAAAAAUGAAGGGGACUAAAA |
| | Cryptococcus CTX1 | | CAACUGUCCGUUCAACGCAAUU |
| | CasM.26 crRNA targeting | 936 | GCCACCCCAAAAAUGAAGGGGACUAAAA |
| | Actinomyces 16S | | CAAUCACCCCACCAACAAGCUG |
| | CasM.26 crRNA targeting | 937 | GCCACCCCAAAAAUGAAGGGGACUAAAA |
| | Actinomyces 16S | | CAGCCAUCACCCCACCAACAAG |
| | CasM.26 crRNA targeting | 938 | GCCACCCCAAAAAUGAAGGGGACUAAAA |
| | Actinomyces 16S | | CAACCUAGUGCCCAACGUUUAC |
| | Cas12 Variant crRNA targeting | 939 | UAAUUUCUACUAAGUGUAGAUGACCGGC |
| | Nocardia 16S | | UUUAAGGGAUUCG |
| | Cas12 Variant crRNA targeting | 940 | UAAUUUCUACUAAGUGUAGAUCGACUUU |
| | Nocardia 16S | | CAUGACGUGACGG |
| | Cas12 Variant crRNA targeting | 941 | UAAUUUCUACUAAGUGUAGAUUCUGCGA |
| | Nocardia 16S | | UUACUAGCGACUC |
| | Cas12 Variant crRNA targeting | 942 | UAAUUUCUACUAAGUGUAGAUCGAUGG |
| | Nocardia hsp65 | | ACACACCAUCGUUG |
| | Cas12 Variant crRNA targeting | 943 | UAAUUUCUACUAAGUGUAGAUUCUCCUU |
| | Nocardia hsp65 | | GGCGAUGGACACA |
| | Cas12 Variant crRNA targeting | 944 | UAAUUUCUACUAAGUGUAGAUCGACCUU |
| | Nocardia hsp65 | | GUCCAUGGCCUCG |
| | Cas12 Variant crRNA targeting | 945 | UAAUUUCUACUAAGUGUAGAUCGAUGA |
| | Nocardia secA1 | | GGAUGGAGUCGACC |
| | Cas12 Variant crRNA targeting | 946 | UAAUUUCUACUAAGUGUAGAUGCCGUGG |
| | Nocardia secA1 | | UCGACGAGGUCGA |
| | Cas12 Variant crRNA targeting | 947 | UAAUUUCUACUAAGUGUAGAUGAUGUC |
| | Nocardia secA1 | | GACCUCGUAGUGCA |
| | Cas12 Variant crRNA targeting | 948 | UAAUUUCUACUAAGUGUAGAUCAGGUCG |
| | Nocardia sodA | | ACAUGUGGGAGCA |
| | Cas12 Variant crRNA targeting | 949 | UAAUUUCUACUAAGUGUAGAUAAGGUC |
| | Nocardia sodA | | AGCAGCUUCUGGCC |
| | Cas12 Variant crRNA targeting | 950 | UAAUUUCUACUAAGUGUAGAUGGCCAGA |
| | Nocardia sodA | | AGCUGCUGACCUU |
| | Cas12 Variant crRNA targeting | 951 | UAAUUUCUACUAAGUGUAGAUAAGCAG |
| | Cryptococcus 18S | | GCAAUCGCCCGAAU |
| | Cas12 Variant crRNA targeting | 952 | UAAUUUCUACUAAGUGUAGAUUAGUCG |
| | Cryptococcus 18S | | AACUUCAGGUCUGG |
| | Cas12 Variant crRNA targeting | 953 | UAAUUUCUACUAAGUGUAGAUGGGGCA |
| | Cryptococcus 18S | | UUGGUAUUCCGUUG |
| | Cas12 Variant crRNA targeting | 954 | UAAUUUCUACUAAGUGUAGAUUCGGUUC |
| | Cryptococcus URA5 | | AAUCCCGGGACGA |
| | Cas12 Variant crRNA targeting | 955 | UAAUUUCUACUAAGUGUAGAUCGGUGGC |
| | Cryptococcus URA5 | | AUAGCCGUUUCGU |
| | Cas12 Variant crRNA targeting | 956 | UAAUUUCUACUAAGUGUAGAUCGAAACG |
| | Cryptococcus URA5 | | GCUAUGCCACCGA |
| | Cas12 Variant crRNA targeting | 957 | UAAUUUCUACUAAGUGUAGAUGCGAAAC |
| | Cryptococcus ITS | | UUAUUACGCCGGG |
| | Cas12 Variant crRNA targeting | 958 | UAAUUUCUACUAAGUGUAGAUGCGUAA |
| | Cryptococcus ITS | | UAAGUUUCGCUGGG |
| | Cas12 Variant crRNA targeting | 959 | UAAUUUCUACUAAGUGUAGAUCACAUUU |
| | Cryptococcus ITS | | AAGGCGAGCCGAC |
| | Cas12 Variant crRNA targeting | 960 | UAAUUUCUACUAAGUGUAGAUCGAGUCG |
| | Cryptococcus 28S | | CGUUACUUGGGAG |
| | Cas12 Variant crRNA targeting | 961 | UAAUUUCUACUAAGUGUAGAUAUGGCCG |
| | Cryptococcus 28S | | GGGUUCGCCCACG |
| | Cas12 Variant crRNA targeting | 962 | UAAUUUCUACUAAGUGUAGAUCGGGCGU |
| | Cryptococcus 28S | | CCGAGUUGUAAUC |
| | Cas12 Variant crRNA targeting | 963 | UAAUUUCUACUAAGUGUAGAUACGCCCC |
| | Cryptococcus CTX1 | | GACGCGCCCAUUA |
| | Cas12 Variant crRNA targeting | 964 | UAAUUUCUACUAAGUGUAGAUGCCGGAC |
| | Cryptococcus CTX1 | | UGACGCACCCUAU |
| | Cas12 Variant crRNA targeting | 965 | UAAUUUCUACUAAGUGUAGAUCAGGUA |
| | Cryptococcus CTX1 | | UUGUGCGCGCCGAC |
| | Cas12 Variant crRNA targeting | 966 | UAAUUUCUACUAAGUGUAGAUUGUAGC |
| | Actinomyces 16S | | AUGCGUGAAGCCCA |
| | Cas12 Variant crRNA targeting | 967 | UAAUUUCUACUAAGUGUAGAUGGGACU |
| | Actinomyces 16S | | UAACCCAACAUCUC |
| | Cas12 Variant crRNA targeting | 968 | UAAUUUCUACUAAGUGUAGAUGGCUGCU |
| | Actinomyces 16S | | GGCACGUAGUUAG |
| | Cas12 Variant crRNA targeting | 969 | UAAUUUCUACUAAGUGUAGAUUGUAGC |
| | Streptococcus 16S | | ACGUGUGUAGCCCA |
| | Cas12 Variant crRNA targeting | 970 | UAAUUUCUACUAAGUGUAGAUCUAAUAC |
| | Streptococcus 16S | | AACGCAGGUCCAU |
| | Cas12 Variant crRNA targeting | 967 | UAAUUUCUACUAAGUGUAGAUGGGACU |
| | Streptococcus 16S | | UAACCCAACAUCUC |
| | Cas12 Variant crRNA targeting | 971 | UAAUUUCUACUAAGUGUAGAUACCAACG |
| | Streptococcus tuf | | CAUGAGGGAGUCA |
| | Cas12 Variant crRNA targeting | 972 | UAAUUUCUACUAAGUGUAGAUCUACAUG |
| | Streptococcus tuf | | ACUUGAACACGCG |
| | Cas12 Variant crRNA targeting | 973 | UAAUUUCUACUAAGUGUAGAUUUCGUA |
| | Streptococcus tuf | | GUCAGGUACUCUAU |
| | Cas12 Variant crRNA targeting | 974 | UAAUUUCUACUAAGUGUAGAUGGCGGU |
| | Streptococcus sodA | | AACACGGGUUCGAA |
| | Cas12 Variant crRNA targeting | 975 | UAAUUUCUACUAAGUGUAGAUGGGGUU |
| | Streptococcus sodA | | AAGACACCGCCUUU |
| | Cas12 Variant crRNA targeting | 976 | UAAUUUCUACUAAGUGUAGAUUGGUCA |
| | Streptococcus sodA | | AGGGGUUAAGACAC |
| | Cas12 Variant crRNA targeting | 975 | UAAUUUCUACUAAGUGUAGAUGGGGUU |
| | Streptococcus rpoB | | AAGACACCGCCUUU |
| | Cas12 Variant crRNA targeting | 974 | UAAUUUCUACUAAGUGUAGAUGGCGGU |
| | Streptococcus rpoB | | AACACGGGUUCGAA |
| | Cas12 Variant crRNA targeting | 976 | UAAUUUCUACUAAGUGUAGAUUGGUCA |
| | Streptococcus rpoB | | AGGGGUUAAGACAC |
| | CasM.26 crRNA targeting | 977 | GCCACCCCAAAAAUGAAGGGGACUAAAA |
| | Aspergillus 18S | | CAGGCGCAAUGUGCGUUCAAAG |
| | CasM.26 crRNA targeting | 978 | GCCACCCCAAAAAUGAAGGGGACUAAAA |
| | Aspergillus 18S | | CACGCUGCGUUCUUCAUCGAUG |
| | CasM.26 crRNA targeting | 979 | GCCACCCCAAAAAUGAAGGGGACUAAAA |
| | Aspergillus 18S | | CAGGCAGCAAUGACGCUCGGAC |
| | CasM.26 crRNA targeting | 980 | GCCACCCCAAAAAUGAAGGGGACUAAAA |
| | Aspergillus 28S | | CAGAAGCGCGUUCCUCGGUCCA |
| | CasM.26 crRNA targeting | 981 | GCCACCCCAAAAAUGAAGGGGACUAAAA |
| | Aspergillus 28S | | CAAAGCGCGUUCCUCGGUCCAG |
| | CasM.26 crRNA targeting | 982 | GCCACCCCAAAAAUGAAGGGGACUAAAA |
| | Aspergillus 28S | | CAAGCGCGUUCCUCGGUCCAGG |
| | CasM.26 crRNA targeting | 983 | GCCACCCCAAAAAUGAAGGGGACUAAAA |
| | Aspergillus ITS | | CAAUCCAUUGUUGAAAGUUUUA |
| | CasM.26 crRNA targeting | 984 | GCCACCCCAAAAAUGAAGGGGACUAAAA |
| | Aspergillus ITS | | CAGAGAUCCAUUGUUGAAAGUU |
| | CasM.26 crRNA targeting | 985 | GCCACCCCAAAAAUGAAGGGGACUAAAA |
| | Aspergillus ITS | | CAACCAAGAGAUCCAUUGUUGA |
| | CasM.26 crRNA targeting | 986 | GCCACCCCAAAAAUGAAGGGGACUAAAA |
| | Candida ITS | | CACUUCAUCGAUGCGAGAACCA |
| | CasM.26 crRNA targeting | 987 | GCCACCCCAAAAAUGAAGGGGACUAAAA |
| | Candida ITS | | CAGACGCUCAAACAGGCAUGCC |
| | CasM.26 crRNA targeting | 988 | GCCACCCCAAAAAUGAAGGGGACUAAAA |
| | Candida ITS | | CACAUCGAUGCGAGAACCAAGA |
| | CasM.26 crRNA targeting | 989 | GCCACCCCAAAAAUGAAGGGGACUAAAA |
| | Candida 28S | | CAUGUUCGCUAUCGGUCUCUCG |
| | CasM.26 crRNA targeting | 990 | GCCACCCCAAAAAUGAAGGGGACUAAAA |
| | Candida 28S | | CACCCUUUCAACAAUUUCACGU |
| | CasM.26 crRNA targeting | 991 | GCCACCCCAAAAAUGAAGGGGACUAAAA |
| | Candida 28S | | CACAUUCCCAAACAACUCGACU |
| | CasM.26 crRNA targeting | 992 | GCCACCCCAAAAAUGAAGGGGACUAAAA |
| | Candida Mitochondrion | | CAUGAGUGAUUAGUGCGAAAUA |
| | CasM.26 crRNA targeting | 993 | GCCACCCCAAAAAUGAAGGGGACUAAAA |
| | Candida Mitochondrion | | CAGACGACAACAAUGUAACGCC |
| | CasM.26 crRNA targeting | 994 | GCCACCCCAAAAAUGAAGGGGACUAAAA |
| | Candida Mitochondrion | | CAAUGGGUACCGAAUCCAUGUC |
| | CasM.26 crRNA targeting | 995 | GCCACCCCAAAAAUGAAGGGGACUAAAA |
| | Candida albicans ERG11 | | CACACGUCUCCAAUAAUGAGGU |
| | CasM.26 crRNA targeting | 996 | GCCACCCCAAAAAUGAAGGGGACUAAAA |
| | Candida albicans ERG11 | | CAGCAUCACGUCUCCAAUAAUG |
| | CasM.26 crRNA targeting | 997 | GCCACCCCAAAAAUGAAGGGGACUAAAA |
| | Candida albicans ERG11 | | CAAAUUGAGCAAAUGAACGGUC |
| | CasM.26 crRNA targeting | 998 | GCCACCCCAAAAAUGAAGGGGACUAAAA |
| | Candida lusitaniae ERG9 | | CACGCGUUCAAAACCAAGUCGU |
| | CasM.26 crRNA targeting | 999 | GCCACCCCAAAAAUGAAGGGGACUAAAA |
| | Candida lusitaniae ERG9 | | CAUCGUUAAUGCACUCGACACC |
| | CasM.26 crRNA targeting | 1000 | GCCACCCCAAAAAUGAAGGGGACUAAAA |
| | Candida lusitaniae ERG9 | | CAGACAUGGUUUAACGCGUUCA |
| | CasM.26 crRNA targeting | 1001 | GCCACCCCAAAAAUGAAGGGGACUAAAA |
| | Clostridium difficile 16S | | CAGAUAAUUCGGCUUCGGGCGU |
| | CasM.26 crRNA targeting | 1002 | GCCACCCCAAAAAUGAAGGGGACUAAAA |
| | Clostridium difficile 16S | | CAUCGGGCGUUUCCAACUCCCG |
| | CasM.26 crRNA targeting | 1003 | GCCACCCCAAAAAUGAAGGGGACUAAAA |
| | Clostridium difficile 16S | | CAUAGAUAAUUCGGCUUCGGGC |
| | CasM.26 crRNA targeting | 1004 | GCCACCCCAAAAAUGAAGGGGACUAAAA |
| | Clostridium perfringens 16S | | CAAUCGCUGACCCUACCUUCGG |
| | CasM.26 crRNA targeting | 1005 | GCCACCCCAAAAAUGAAGGGGACUAAAA |
| | Clostridium perfringens 16S | | CACGGACUUCGGGUAUUGCCAA |
| | CasM.26 crRNA targeting | 1006 | GCCACCCCAAAAAUGAAGGGGACUAAAA |
| | Clostridium perfringens 16S | | CACUUGCGGUUAGCUCACGGAC |
| | CasM.26 crRNA targeting | 1007 | GCCACCCCAAAAAUGAAGGGGACUAAAA |
| | Clostridium tetani 16S | | CAUUAACCCCACCUUCGGCCGC |
| | CasM.26 crRNA targeting | 1008 | GCCACCCCAAAAAUGAAGGGGACUAAAA |
| | Clostridium tetani 16S | | CAUAGCAACUCCGGCUUCAUGC |
| | CasM.26 crRNA targeting | 1009 | GCCACCCCAAAAAUGAAGGGGACUAAAA |
| | Clostridium tetani 16S | | CACGGACUUCGGGUGUUGCCAA |
| | CasM.26 crRNA targeting | 1010 | GCCACCCCAAAAAUGAAGGGGACUAAAA |
| | Campylobacteraceae 16S | | CACUCGCGGUAUUGCGUCUCAU |
| | CasM.26 crRNA targeting | 1011 | GCCACCCCAAAAAUGAAGGGGACUAAAA |
| | Campylobacteraceae 16S | | CACAAUCCGAACUGGGACAUAU |
| | CasM.26 crRNA targeting | 1012 | GCCACCCCAAAAAUGAAGGGGACUAAAA |
| | Campylobacteraceae 16S | | CAAUAGAUUUGCUCCACCUCGC |
| | CasM.26 crRNA targeting | 1013 | GCCACCCCAAAAAUGAAGGGGACUAAAA |
| | Campylobacteraceae 23S | | CACCAAACUUAGCUACGCUGCG |
| | CasM.26 crRNA targeting | 1014 | GCCACCCCAAAAAUGAAGGGGACUAAAA |
| | Campylobacteraceae 23S | | CAGUGGUUUGUUCAACCCGGUC |
| | CasM.26 crRNA targeting | 1015 | GCCACCCCAAAAAUGAAGGGGACUAAAA |
| | Campylobacteraceae 23S | | CAUUAGCUACGCUGCGAUGCUC |
| | CasM.26 crRNA targeting | 1016 | GCCACCCCAAAAAUGAAGGGGACUAAAA |
| | Campylobacteraceae flaG | | CAGAUAAGAAGAAUCCGCACAA |
| | CasM.26 crRNA targeting | 1017 | GCCACCCCAAAAAUGAAGGGGACUAAAA |
| | Campylobacteraceae flaG | | CAAUAGGAUAAGAAGAAUCCGC |
| | CasM.26 crRNA targeting | 1018 | GCCACCCCAAAAAUGAAGGGGACUAAAA |
| | Campylobacteraceae flaG | | CAUAGGAUAAGAAGAAUCCGCA |
| | CasM.26 crRNA targeting | 1019 | GCCACCCCAAAAAUGAAGGGGACUAAAA |
| | Corynebacterium 16S | | CACGGCUUUCAGCGAUUCGCUC |
| | CasM.26 crRNA targeting | 1020 | GCCACCCCAAAAAUGAAGGGGACUAAAA |
| | Corynebacterium 16S | | CAGCGUUGUACCGACCAUUGUA |
| | CasM.26 crRNA targeting | 1021 | GCCACCCCAAAAAUGAAGGGGACUAAAA |
| | Corynebacterium 16S | | CAGGCCGGCUUUCAGCGAUUCG |
| | CasM.26 crRNA targeting | 1022 | GCCACCCCAAAAAUGAAGGGGACUAAAA |
| | Corynebacterium rpoB | | CAGGACGCUCGGUGGACUUAUC |
| | CasM.26 crRNA targeting | 1023 | GCCACCCCAAAAAUGAAGGGGACUAAAA |
| | Corynebacterium rpoB | | CAUGAGAAGCGUGAACGUCUCG |
| | CasM.26 crRNA targeting | 1024 | GCCACCCCAAAAAUGAAGGGGACUAAAA |
| | Corynebacterium rpoB | | CAUGGCCGAUGUUCAUACGACG |
| | CasM.26 crRNA targeting | 1025 | GCCACCCCAAAAAUGAAGGGGACUAAAA |
| | Corynebacterium tox | | CAUACAUCGCAUCUUGGCCACG |
| | CasM.26 crRNA targeting | 1026 | GCCACCCCAAAAAUGAAGGGGACUAAAA |
| | Corynebacterium tox | | CAGAGCACUACACGCGAAGCAC |
| | CasM.26 crRNA targeting | 1027 | GCCACCCCAAAAAUGAAGGGGACUAAAA |
| | Corynebacterium tox | | CACGAAGCACCAUCACCGAACC |
| | CasM.26 crRNA targeting | 1028 | GCCACCCCAAAAAUGAAGGGGACUAAAA |
| | Corynebacterium diphtheriae | | CAGUGCAUUGAUUAGUUCGCCG |
| | chrA | | |
| | CasM.26 crRNA targeting | 1029 | GCCACCCCAAAAAUGAAGGGGACUAAAA |
| | Corynebacterium diphtheriae | | CAAUCGCUUCCAAACCGGCCGU |
| | chrA | | |
| | CasM.26 crRNA targeting | 1030 | GCCACCCCAAAAAUGAAGGGGACUAAAA |
| | Corynebacterium diphtheriae | | CAACGGCCGGUUUGGAAGCGAU |
| | chrA | | |
| | CasM.26 crRNA targeting | 1031 | GCCACCCCAAAAAUGAAGGGGACUAAAA |
| | Corynebacterium | | CAACUUUAUGUGAGUCGCCGCG |
| | pseudotuberculosis chrA | | |
| | CasM.26 crRNA targeting | 1032 | GCCACCCCAAAAAUGAAGGGGACUAAAA |
| | Corynebacterium | | CAAUUAGUGAGUGUAAGGCGAG |
| | pseudotuberculosis chrA | | |
| | CasM.26 crRNA targeting | 1033 | GCCACCCCAAAAAUGAAGGGGACUAAAA |
| | Corynebacterium | | CACGACCGACAGCGCCCCUCAC |
| | pseudotuberculosis chrA | | |
| | CasM.26 crRNA targeting | 1034 | GCCACCCCAAAAAUGAAGGGGACUAAAA |
| | Corynebacterium | | CACGAGCUUCGCUGGACUUACG |
| | pseudotuberculosis pld | | |
| | CasM.26 crRNA targeting | 1035 | GCCACCCCAAAAAUGAAGGGGACUAAAA |
| | Corynebacterium | | CAAAGAUCAUUAACUCGCGCGU |
| | pseudotuberculosis pld | | |
| | CasM.26 crRNA targeting | 1036 | GCCACCCCAAAAAUGAAGGGGACUAAAA |
| | Corynebacterium | | CAAUUAACUCGCGCGUCCUGAC |
| | pseudotuberculosis pld | | |
| | CasM.26 crRNA targeting | 1037 | GCCACCCCAAAAAUGAAGGGGACUAAAA |
| | Corynebacterium | | CAUCGCAACUACGCGAAGCAAC |
| | striatum chrA | | |
| | CasM.26 crRNA targeting | 1038 | GCCACCCCAAAAAUGAAGGGGACUAAAA |
| | Corynebacterium | | CACCACCGCAUCGCAACUACGC |
| | striatum chrA | | |
| | CasM.26 crRNA targeting | 1039 | GCCACCCCAAAAAUGAAGGGGACUAAAA |
| | Corynebacterium | | CAGUUGUCCGGAAUGUGACCCG |
| | striatum chrA | | |
| | CasM.26 crRNA targeting | 1040 | GCCACCCCAAAAAUGAAGGGGACUAAAA |
| | Corynebacterium ulcerans pld | | CAACCGUUCGCACCACGCUUAU |
| | CasM.26 crRNA targeting | 1041 | GCCACCCCAAAAAUGAAGGGGACUAAAA |
| | Corynebacterium ulcerans pld | | CACUUAUCGACGACCAACUCAU |
| | CasM.26 crRNA targeting | 1042 | GCCACCCCAAAAAUGAAGGGGACUAAAA |
| | Corynebacterium ulcerans pld | | CAUUGUCGCGGUACUCCACGAU |
| | CasM.26 crRNA targeting | 1043 | GCCACCCCAAAAAUGAAGGGGACUAAAA |
| | Escherichia coli O157:H1 | | CAACGUGAAGCGCGGUUUGCGA |
| | pO157 | | |
| | CasM.26 crRNA targeting | 1044 | GCCACCCCAAAAAUGAAGGGGACUAAAA |
| | Escherichia coli O157:H1 | | CACGAAACGGCGUUGCCCCUUA |
| | pO157 | | |
| | CasM.26 crRNA targeting | 1045 | GCCACCCCAAAAAUGAAGGGGACUAAAA |
| | Escherichia coli O157:H1 | | CAAACGACGUGAAGCGCGGUUU |
| | pO157 | | |
| | CasM.26 crRNA targeting | 1046 | GCCACCCCAAAAAUGAAGGGGACUAAAA |
| | Escherichia coli O0157:H1 | | CAAUCGCGUUGUCAUACGAGUC |
| | stx2A | | |
| | CasM.26 crRNA targeting | 1047 | GCCACCCCAAAAAUGAAGGGGACUAAAA |
| | Escherichia coli O157:H1 | | CACCAGCAAUCGUCGAUUGUUA |
| | stx2A | | |
| | CasM.26 crRNA targeting | 1048 | GCCACCCCAAAAAUGAAGGGGACUAAAA |
| | Escherichia coli O157:H1 | | CAGCUCUUACGGUGUAUUACCU |
| | stx2A | | |
| | CasM.26 crRNA targeting | 1049 | GCCACCCCAAAAAUGAAGGGGACUAAAA |
| | Shiga toxin stx | | CACGGGUUAACCCAAUCGGCUU |
| | CasM.26 crRNA targeting | 1050 | GCCACCCCAAAAAUGAAGGGGACUAAAA |
| | Shiga toxin stx | | CAAUAGCCCGUCAUUUCUGCGC |
| | CasM.26 crRNA targeting | 1051 | GCCACCCCAAAAAUGAAGGGGACUAAAA |
| | Shiga toxin stx | | CAGUUGGUUACGUAUCGUUUAA |
| | CasM.26 crRNA targeting | 1052 | GCCACCCCAAAAAUGAAGGGGACUAAAA |
| | Listeria monocytogenes 16S | | CAGCUUCGCGACCCUUUGUACU |
| | CasM.26 crRNA targeting | 1053 | GCCACCCCAAAAAUGAAGGGGACUAAAA |
| | Listeria monocytogenes 16S | | CACACCUCGCGGCUUCGCGACC |
| | CasM.26 crRNA targeting | 1054 | GCCACCCCAAAAAUGAAGGGGACUAAAA |
| | Listeria monocytogenes 16S | | CAAUAAAGGUGACCCUACCGAC |
| | CasM.26 crRNA targeting | 1055 | GCCACCCCAAAAAUGAAGGGGACUAAAA |
| | Listeria monocytogenes 23S | | CACAGCGAUGCUCCUGGCGGAA |
| | CasM.26 crRNA targeting | 1056 | GCCACCCCAAAAAUGAAGGGGACUAAAA |
| | Listeria monocytogenes 23S | | CAAGGGAUCUUACUUUCCGAAG |
| | CasM.26 crRNA targeting | 1057 | GCCACCCCAAAAAUGAAGGGGACUAAAA |
| | Listeria monocytogenes 23S | | CAUAGCUACCCAGCGAUGCUCC |
| | CasM.26 crRNA targeting | 1058 | GCCACCCCAAAAAUGAAGGGGACUAAAA |
| | Listeria monocytogenes prfA | | CAUUCGUAAACGUACGUAACGG |
| | CasM.26 crRNA targeting | 1059 | GCCACCCCAAAAAUGAAGGGGACUAAAA |
| | Listeria monocytogenes prfA | | CACGUACGUAACGGUUUGUUUA |
| | CasM.26 crRNA targeting | 1060 | GCCACCCCAAAAAUGAAGGGGACUAAAA |
| | Listeria monocytogenes prfA | | CAAUCUACCGGAUCUACCGGAU |
| | CasM.26 crRNA targeting | 1061 | GCCACCCCAAAAAUGAAGGGGACUAAAA |
| | Mycobacterium bovis 16S | | CACGACAAACCACUACGAGCUC |
| | CasM.26 crRNA targeting | 1062 | GCCACCCCAAAAAUGAAGGGGACUAAAA |
| | Mycobacterium bovis 16S | | CAACAACGCGACAAACCACUAC |
| | CasM.26 crRNA targeting | 1063 | GCCACCCCAAAAAUGAAGGGGACUAAAA |
| | Mycobacterium bovis 16S | | CAACCACUACGAGCUCUUUACG |
| | CasM.26 crRNA targeting | 1064 | GCCACCCCAAAAAUGAAGGGGACUAAAA |
| | Neisseria meningitidis 16S | | CAGUAAGCGGGCUCCUUGCGGU |
| | CasM.26 crRNA targeting | 1065 | GCCACCCCAAAAAUGAAGGGGACUAAAA |
| | Neisseria meningitidis 16S | | CACCGUGGUAAGCGGGCUCCUU |
| | CasM.26 crRNA targeting | 1066 | GCCACCCCAAAAAUGAAGGGGACUAAAA |
| | Neisseria meningitidis 16S | | CACGGGCUCCUUGCGGUUACCC |
| | CasM.26 crRNA targeting | 1067 | GCCACCCCAAAAAUGAAGGGGACUAAAA |
| | Neisseria meningitidis 23S | | CACGAACGACUCUUUAGUGCGG |
| | CasM.26 crRNA targeting | 1068 | GCCACCCCAAAAAUGAAGGGGACUAAAA |
| | Neisseria meningitidis 23S | | CAUAGUGCGGUUAAACCGCAAG |
| | CasM.26 crRNA targeting | 1069 | GCCACCCCAAAAAUGAAGGGGACUAAAA |
| | Neisseria meningitidis 23S | | CACGGCUAUGCAACUGGCGUUA |
| | CasM.26 crRNA targeting | 1070 | GCCACCCCAAAAAUGAAGGGGACUAAAA |
| | Salmonella enterica Paratyphi | | CAUCGCCUGCGCCAGAACGGAG |
| | filC | | |
| | CasM.26 crRNA targeting | 1071 | GCCACCCCAAAAAUGAAGGGGACUAAAA |
| | Salmonella enterica Paratyphi | | CAGUUUUGCGGAACCUGGUUCG |
| | filC | | |
| | CasM.26 crRNA targeting | 1072 | GCCACCCCAAAAAUGAAGGGGACUAAAA |
| | Salmonella enterica Paratyphi | | CAACCGCACCCAAGUCAGAACG |
| | filC | | |
| | CasM.26 crRNA targeting | 1073 | GCCACCCCAAAAAUGAAGGGGACUAAAA |
| | Salmonella enterica Typhi | | CACGGGAUCGAUAAUUGCUCAC |
| | segment 2/20 | | |
| | CasM.26 crRNA targeting | 1074 | GCCACCCCAAAAAUGAAGGGGACUAAAA |
| | Salmonella enterica Typhi | | CACCGGAUACGGGAUCGAUAAU |
| | segment 2/20 | | |
| | CasM.26 crRNA targeting | 1075 | GCCACCCCAAAAAUGAAGGGGACUAAAA |
| | Salmonella enterica Typhi | | CAAGUCCUGUAUCUUCGCCGUA |
| | segment 2/20 | | |
| | CasM.26 crRNA targeting | 1076 | GCCACCCCAAAAAUGAAGGGGACUAAAA |
| | Salmonella enterica Typhi 16S | | CAGCGCCCCCCCGAAGGUUAAG |
| | CasM.26 crRNA targeting | 1077 | GCCACCCCAAAAAUGAAGGGGACUAAAA |
| | Salmonella enterica Typhi 16S | | CACCCCGAAGGUUAAGCUACCU |
| | CasM.26 crRNA targeting | 1078 | GCCACCCCAAAAAUGAAGGGGACUAAAA |
| | Salmonella enterica Typhi 16S | | CACACAAAGUGGUAAGCGCCCC |
| | CasM.26 crRNA targeting | 1079 | GCCACCCCAAAAAUGAAGGGGACUAAAA |
| | Salmonella enterica Enteritides | | CAUGAUGAGCGACAUUACCGUA |
| | difference region 1 | | |
| | CasM.26 crRNA targeting | 1080 | GCCACCCCAAAAAUGAAGGGGACUAAAA |
| | Salmonella enterica Enteritides | | CAGAACAAUGUUGAUGAGCGAC |
| | difference region 1 | | |
| | CasM.26 crRNA targeting | 1081 | GCCACCCCAAAAAUGAAGGGGACUAAAA |
| | Salmonella enterica Enteritides | | CACGUUCUGUGCUGGACAUACG |
| | difference region 1 | | |
| | CasM.26 crRNA targeting | 1082 | GCCACCCCAAAAAUGAAGGGGACUAAAA |
| | Salmonella enterica Enteritides | | CAACGUAUCUGAUCCCAGAAUG |
| | caiC | | |
| | CasM.26 crRNA targeting | 1083 | GCCACCCCAAAAAUGAAGGGGACUAAAA |
| | Salmonella enterica Enteritides | | CAUCGCCUGAUAUUUACGUAUC |
| | caiC | | |
| | CasM.26 crRNA targeting | 1084 | GCCACCCCAAAAAUGAAGGGGACUAAAA |
| | Salmonella enterica Enteritides | | CAUCUGAUCCCAGAAUGCCCGG |
| | caiC | | |
| | CasM.26 crRNA targeting | 1085 | GCCACCCCAAAAAUGAAGGGGACUAAAA |
| | Yersinia enterocolitica 16S | | CACGACAGACUUUAUGUGGUCC |
| | CasM.26 crRNA targeting | 1086 | GCCACCCCAAAAAUGAAGGGGACUAAAA |
| | Yersinia enterocolitica 16S | | CAGACUACGACAGACUUUAUGU |
| | CasM.26 crRNA targeting | 1087 | GCCACCCCAAAAAUGAAGGGGACUAAAA |
| | Yersinia enterocolitica 16S | | CAAGACUUUAUGUGGUCCGCUU |
| | CasM.26 crRNA targeting | 1088 | GCCACCCCAAAAAUGAAGGGGACUAAAA |
| | Yersinia enterocolitica 23S | | CAUCAGGGGGCUUUAAGCCCCA |
| | CasM.26 crRNA targeting | 1089 | GCCACCCCAAAAAUGAAGGGGACUAAAA |
| | Yersinia enterocolitica 23S | | CAGGGCUUUAAGCCCCAGGGAA |
| | CasM.26 crRNA targeting | 1090 | GCCACCCCAAAAAUGAAGGGGACUAAAA |
| | Yersinia enterocolitica 23S | | CAUUAACGUUCCUUCAGGGGGC |
| | CasM.26 crRNA targeting | 1091 | GCCACCCCAAAAAUGAAGGGGACUAAAA |
| | Yersinia pseudotuberculosis | | CACGAGGCAAGUUUCCUGCUUA |
| | 23S | | |
| | CasM.26 crRNA targeting | 1092 | GCCACCCCAAAAAUGAAGGGGACUAAAA |
| | Yersinia pseudotuberculosis | | CACAUCUCGAGGCAAGUUUCCU |
| | 23S | | |
| | CasM.26 crRNA targeting | 1093 | GCCACCCCAAAAAUGAAGGGGACUAAAA |
| | Yersinia pseudotuberculosis | | CACUGCUUAGAUGCUUUCAGCG |
| | 23S | | |
| | CasM.26 crRNA targeting | 1094 | GCCACCCCAAAAAUGAAGGGGACUAAAA |
| | Vibrio cholerae 16S | | CAACGACGUACUUUGUGAGAUU |
| | CasM.26 crRNA targeting | 1095 | GCCACCCCAAAAAUGAAGGGGACUAAAA |
| | Vibrio cholerae 16S | | CACGCAACAUUCUGAUUUGCGA |
| | CasM.26 crRNA targeting | 1096 | GCCACCCCAAAAAUGAAGGGGACUAAAA |
| | Vibrio cholerae 16S | | CAACCACAAAGUGGCAAGCGUC |
| | CasM.26 crRNA targeting | 1097 | GCCACCCCAAAAAUGAAGGGGACUAAAA |
| | Vibrio cholerae hlyA | | CAACGCUACGCGUUGACAGUCC |
| | CasM.26 crRNA targeting | 1098 | GCCACCCCAAAAAUGAAGGGGACUAAAA |
| | Vibrio cholerae hlyA | | CAGCCGCGCGUUGACAGUCCCU |
| | CasM.26 crRNA targeting | 1099 | GCCACCCCAAAAAUGAAGGGGACUAAAA |
| | Vibrio cholerae hly A | | CACACAUAACGCCCGCCUAAGG |
| | CasM.26 crRNA targeting | 1100 | GCCACCCCAAAAAUGAAGGGGACUAAAA |
| | Vibrio parahaemolyticus 23S | | CAGUAAGCGUCCCCCCGAAGGU |
| | CasM.26 crRNA targeting | 1101 | GCCACCCCAAAAAUGAAGGGGACUAAAA |
| | Vibrio parahaemolyticus 23S | | CACCCCGAAGGUUAAACUACCU |
| | CasM.26 crRNA targeting | 1102 | GCCACCCCAAAAAUGAAGGGGACUAAAA |
| | Vibrio parahaemolyticus 23S | | CACACAAAGUGGUAAGCGUCCC |
| | CasM.26 crRNA targeting | 1103 | GCCACCCCAAAAAUGAAGGGGACUAAAA |
| | Vibrio vulnificus 16S | | CAACCACAAAGUGGUGAGCGUC |
| | CasM.26 crRNA targeting | 1104 | GCCACCCCAAAAAUGAAGGGGACUAAAA |
| | Vibrio vulnificus 16S | | CAAGCGCCAGGUUCCCCUAGCG |
| | CasM.26 crRNA targeting | 1105 | GCCACCCCAAAAAUGAAGGGGACUAAAA |
| | Vibrio vulnificus 16S | | CACCAGGUUCCCCUAGCGCUAC |
| | CasM.26 crRNA targeting | 1106 | GCCACCCCAAAAAUGAAGGGGACUAAAA |
| | Vibrio vulnificus 23S | | CACGAACAACCCUUCAGGAUAC |
| | CasM.26 crRNA targeting | 1107 | GCCACCCCAAAAAUGAAGGGGACUAAAA |
| | Vibrio vulnificus 23S | | CACAGGAUACUUAAAGUAUCAG |
| | CasM.26 crRNA targeting | 1108 | GCCACCCCAAAAAUGAAGGGGACUAAAA |
| | Vibrio vulnificus 23S | | CAACCCUUCAGGAUACUUAAAG |
| | CasM.26 crRNA targeting | 1109 | GCCACCCCAAAAAUGAAGGGGACUAAAA |
| | Cronobacter flk | | CAGCGGGUGCGCUUUGCUUACC |
| | CasM.26 crRNA targeting | 1110 | GCCACCCCAAAAAUGAAGGGGACUAAAA |
| | Cronobacter flk | | CAGGUGGGUAAGCGAAGCGCAC |
| | CasM.26 crRNA targeting | 1111 | GCCACCCCAAAAAUGAAGGGGACUAAAA |
| | Cronobacter flk | | CAGUGCGCUUCGCUUACCCACC |
| | CasM.26 crRNA targeting | 175 | GCCACCCCAAAAAUGAAGGGGACUAAAA |
| | Alphacoronavirus complete | | CAUCUAGUCGAGCUGCACUAGA |
| | genome | | |
| | CasM.26 crRNA targeting | 1112 | GCCACCCCAAAAAUGAAGGGGACUAAAA |
| | Alphacoronavirus complete | | CAUUACCACUACCAGGAGGACC |
| | genome | | |
| | CasM.26 crRNA targeting | 1113 | GCCACCCCAAAAAUGAAGGGGACUAAAA |
| | Alphacoronavirus complete | | CACCCCGCACUCGUUUAAAUAA |
| | genome | | |
| | CasM.26 crRNA targeting | 1114 | GCCACCCCAAAAAUGAAGGGGACUAAAA |
| | Betacoronavirus complete | | CAGGAUAAUCCCAACCCAUAAG |
| | genome | | |
| | CasM.26 crRNA targeting | 1115 | GCCACCCCAAAAAUGAAGGGGACUAAAA |
| | Betacoronavirus complete | | CAUUAGGAUAAUCCCAACCCAU |
| | genome | | |
| | CasM.26 crRNA targeting | 1116 | GCCACCCCAAAAAUGAAGGGGACUAAAA |
| | Betacoronavirus complete | | CACUAUUCUUAGCACUAAUAGC |
| | genome | | |
| | CasM.26 crRNA targeting | 1117 | GCCACCCCAAAAAUGAAGGGGACUAAAA |
| | Deltacoronavirus complete | | CAUGUACCCUCGAUCGUACUCC |
| | genome | | |
| | CasM.26 crRNA targeting | 1118 | GCCACCCCAAAAAUGAAGGGGACUAAAA |
| | Deltacoronavirus complete | | CAUCGUACUCCGCGUGGCCUCG |
| | genome | | |
| | CasM.26 crRNA targeting | 1119 | GCCACCCCAAAAAUGAAGGGGACUAAAA |
| | Deltacoronavirus complete | | CACCUCGAUCGUACUCCGCGUG |
| | genome | | |
| | CasM.26 crRNA targeting | 1120 | GCCACCCCAAAAAUGAAGGGGACUAAAA |
| | Cytomegalovirus complete | | CAUCCGCGUGUGUAAACGGCGU |
| | genome | | |
| | CasM.26 crRNA targeting | 1121 | GCCACCCCAAAAAUGAAGGGGACUAAAA |
| | Cytomegalovirus complete | | CACGUGUGUCCUCGACGCGGGU |
| | genome | | |
| | CasM.26 crRNA targeting | 1122 | GCCACCCCAAAAAUGAAGGGGACUAAAA |
| | Cytomegalovirus complete | | CAAUACCGGCGCAUGCGCACGA |
| | genome | | |
| | CasM.26 crRNA targeting | 1123 | GCCACCCCAAAAAUGAAGGGGACUAAAA |
| | Goatpox virus P32 | | CAGUGCUCCCAUUAUACUAAUA |
| | CasM.26 crRNA targeting | 1124 | GCCACCCCAAAAAUGAAGGGGACUAAAA |
| | Goatpox virus P32 | | CAUACCUGCUAAAAGCCAUAGU |
| | CasM.26 crRNA targeting | 1125 | GCCACCCCAAAAAUGAAGGGGACUAAAA |
| | Goatpox virus P32 | | CAUAAGUGCUCCCAUUAUACUA |
| | CasM.26 crRNA targeting | 1126 | GCCACCCCAAAAAUGAAGGGGACUAAAA |
| | Sheeppox virus P32 | | CACUUGUCUAUUUAGUUUUAGU |
| | CasM.26 crRNA targeting | 1127 | GCCACCCCAAAAAUGAAGGGGACUAAAA |
| | Sheeppox virus P32 | | CAGUCUAUUUAGUUUUAGUUCU |
| | CasM.26 crRNA targeting | 1128 | GCCACCCCAAAAAUGAAGGGGACUAAAA |
| | Sheeppox virus P32 | | CAUAGUUUUAGUUCUUUCUCUA |
| | CasM.26 crRNA targeting | 1129 | GCCACCCCAAAAAUGAAGGGGACUAAAA |
| | Mycoplasma capricolum | | CAUCUUACAUCUUAUGAAUGGG |
| | capripneumoniae 23S | | |
| | CasM.26 crRNA targeting | 1130 | GCCACCCCAAAAAUGAAGGGGACUAAAA |
| | Mycoplasma capricolum | | CAGGAUCUUACAUCUUAUGAAU |
| | capripneumoniae 23S | | |
| | CasM.26 crRNA targeting | 1131 | GCCACCCCAAAAAUGAAGGGGACUAAAA |
| | Mycoplasma capricolum | | CAGCACCAGAGGUGCAUCCAUU |
| | capripneumoniae 23S | | |
| | CasM.26 crRNA targeting | 1132 | GCCACCCCAAAAAUGAAGGGGACUAAAA |
| | Mycoplasma capricolum | | CAACCGUGAUCUCUAGGUCUAA |
| | capripneumoniae L22 | | |
| | CasM.26 crRNA targeting | 1133 | GCCACCCCAAAAAUGAAGGGGACUAAAA |
| | Mycoplasma capricolum | | CAUCAUAUGCUCUACCGUGAUC |
| | capripneumoniae L22 | | |
| | CasM.26 crRNA targeting | 1134 | GCCACCCCAAAAAUGAAGGGGACUAAAA |
| | Mycoplasma capricolum | | CAGAUUGUAUCUGCAACUAAUC |
| | capripneumoniae L22 | | |
| | CasM.26 crRNA targeting | 1135 | GCCACCCCAAAAAUGAAGGGGACUAAAA |
| | Mycoplasma mycoides | | CAUGGGAAGCGCUCUCCAAAUG |
| | mycoides 23S | | |
| | CasM.26 crRNA targeting | 1136 | GCCACCCCAAAAAUGAAGGGGACUAAAA |
| | Mycoplasma mycoides | | CAGCUCUCCAAAUGGUUAAGCU |
| | mycoides 23S | | |
| | CasM.26 crRNA targeting | 1137 | GCCACCCCAAAAAUGAAGGGGACUAAAA |
| | Mycoplasma mycoides | | CAAAUGGUUAAGCUACCUACUU |
| | mycoides 23S | | |
| | CasM.26 crRNA targeting | 1138 | GCCACCCCAAAAAUGAAGGGGACUAAAA |
| | Mycoplasma mycoides | | CAUAGAUCAGCUUCUAAUUUAC |
| | mycoides lppB | | |
| | CasM.26 crRNA targeting | 1139 | GCCACCCCAAAAAUGAAGGGGACUAAAA |
| | Mycoplasma mycoides | | CAUCGUUUUUAGAUUUUAGAUC |
| | mycoides lppB | | |
| | CasM.26 crRNA targeting | 1140 | GCCACCCCAAAAAUGAAGGGGACUAAAA |
| | Mycoplasma mycoides | | CAAGUUUCAAAUUGAGAGAUUA |
| | mycoides lppB | | |
| | CasM.26 crRNA targeting | 1141 | GCCACCCCAAAAAUGAAGGGGACUAAAA |
| | Gammacoronavirus complete | | CAACCCCGUACCCGUUUAAAUA |
| | genome | | |
| | CasM.26 crRNA targeting | 169 | GCCACCCCAAAAAUGAAGGGGACUAAAA |
| | Gammacoronavirus complete | | CACCCCGUACCCGUUUAAAUAA |
| | genome | | |
| | CasM.26 crRNA targeting | 1142 | GCCACCCCAAAAAUGAAGGGGACUAAAA |
| | Gammacoronavirus complete | | CACCGUACCCGUUUAAAUAAUU |
| | genome | | |
| | CasM.26 crRNA targeting | 1143 | GCCACCCCAAAAAUGAAGGGGACUAAAA |
| | Newcastle disease virus whole | | CAGCUAAGUCAAGUCUCGCAAA |
| | genome | | |
| | CasM.26 crRNA targeting | 1144 | GCCACCCCAAAAAUGAAGGGGACUAAAA |
| | Newcastle disease virus whole | | CAAAUGGACGGACGGGCUGUCC |
| | genome | | |
| | CasM.26 crRNA targeting | 1145 | GCCACCCCAAAAAUGAAGGGGACUAAAA |
| | Newcastle disease virus whole | | CAUUGAUGAUUACUACCCCGCC |
| | genome | | |
| | CasM.26 crRNA targeting | 1146 | GCCACCCCAAAAAUGAAGGGGACUAAAA |
| | Peste des petits ruminants | | CAUUAGUGAACUCGUCCGCACC |
| | virus (PPRV) whole genome | | |
| | CasM.26 crRNA targeting | 1147 | GCCACCCCAAAAAUGAAGGGGACUAAAA |
| | Peste des petits ruminants | | CACGUAUCGAGGGUGAACAACC |
| | virus (PPRV) whole genome | | |
| | CasM.26 crRNA targeting | 1148 | GCCACCCCAAAAAUGAAGGGGACUAAAA |
| | Peste des petits ruminants | | CAUCACUUCUUUCGUAUCGAGG |
| | virus (PPRV) whole genome | | |
| | CasM.26 crRNA targeting | 1149 | GCCACCCCAAAAAUGAAGGGGACUAAAA |
| | Porcine Reproductive and | | CACGACCGCCAACGAUAGAGUC |
| | Respriatory Syndrome (PRRS) | | |
| | virus - North American whole | | |
| | genome | | |
| | CasM.26 crRNA targeting | 1150 | GCCACCCCAAAAAUGAAGGGGACUAAAA |
| | Porcine Reproductive and | | CAGGUAUAUCUGGUACACGCGU |
| | Respriatory Syndrome (PRRS) | | |
| | virus - North American whole | | |
| | genome | | |
| | CasM.26 crRNA targeting | 1151 | GCCACCCCAAAAAUGAAGGGGACUAAAA |
| | Porcine Reproductive and | | CAGGACGACCCCAUUGUUCCGC |
| | Respriatory Syndrome (PRRS) | | |
| | virus - North American whole | | |
| | genome | | |
| | CasM.26 crRNA targeting | 1152 | GCCACCCCAAAAAUGAAGGGGACUAAAA |
| | Porcine Reproductive and | | CAGAAGUCACGCGAAUCAGGCG |
| | Respriatory Syndrome (PRRS) | | |
| | virus - European whole genome | | |
| | CasM.26 crRNA targeting | 1153 | GCCACCCCAAAAAUGAAGGGGACUAAAA |
| | Porcine Reproductive and | | CAGCGCCUUGAUUGAAAGCCGU |
| | Respriatory Syndrome (PRRS) | | |
| | virus - European whole genome | | |
| | CasM.26 crRNA targeting | 1154 | GCCACCCCAAAAAUGAAGGGGACUAAAA |
| | Porcine Reproductive and | | CAUAUGAGCAACCGGCAGCAUA |
| | Respriatory Syndrome (PRRS) | | |
| | virus - European whole genome | | |
| | CasM.26 crRNA targeting | 1155 | GCCACCCCAAAAAUGAAGGGGACUAAAA |
| | Porcine Reproductive and | | CAAUUGGUAUGUCGAGCUGUUG |
| | Respriatory Syndrome (PRRS) | | |
| | virus - Eastern European whole | | |
| | genome | | |
| | CasM.26 crRNA targeting | 1156 | GCCACCCCAAAAAUGAAGGGGACUAAAA |
| | Porcine Reproductive and | | CAUGUAUUGGUAUGUCGAGCUG |
| | Respriatory Syndrome (PRRS) | | |
| | virus - Eastern European whole | | |
| | genome | | |
| | CasM.26 crRNA targeting | 1157 | GCCACCCCAAAAAUGAAGGGGACUAAAA |
| | Porcine Reproductive and | | CAGGUAUGUCGAGCUGUUGCCG |
| | Respriatory Syndrome (PRRS) | | |
| | virus - Eastern European whole | | |
| | genome | | |
| | CasM.26 crRNA targeting | 1158 | GCCACCCCAAAAAUGAAGGGGACUAAAA |
| | Andes Orthohantavirus | | CAGAACCCUUACCCGUAGUUAG |
| | Segment S | | |
| | CasM.26 crRNA targeting | 1159 | GCCACCCCAAAAAUGAAGGGGACUAAAA |
| | Andes Orthohantavirus | | CAAGUAAUGAACCCUUACCCGU |
| | Segment S | | |
| | CasM.26 crRNA targeting | 1160 | GCCACCCCAAAAAUGAAGGGGACUAAAA |
| | Andes Orthohantavirus | | CAUAGGUUAGCAAUGCGAAAGC |
| | Segment S | | |
| | CasM.26 crRNA targeting | 1161 | GCCACCCCAAAAAUGAAGGGGACUAAAA |
| | Andes Orthohantavirus | | CAGGCACUCUGUUAAUCCGACA |
| | Segment M | | |
| | CasM.26 crRNA targeting | 1162 | GCCACCCCAAAAAUGAAGGGGACUAAAA |
| | Andes Orthohantavirus | | CAGGUCAAUCCAUUCAAGCUUA |
| | Segment M | | |
| | CasM.26 crRNA targeting | 1163 | GCCACCCCAAAAAUGAAGGGGACUAAAA |
| | Andes Orthohantavirus | | CAAUGACCUCCCUUACCAACUA |
| | Segment M | | |
| | CasM.26 crRNA targeting | 1164 | GCCACCCCAAAAAUGAAGGGGACUAAAA |
| | Andes Orthohantavirus | | CAGGGUCACGCGGGAACAACCU |
| | Segment L | | |
| | CasM.26 crRNA targeting | 1165 | GCCACCCCAAAAAUGAAGGGGACUAAAA |
| | Andes Orthohantavirus | | CAUACAGGGUCACGCGGGAACA |
| | Segment L | | |
| | CasM.26 crRNA targeting | 1166 | GCCACCCCAAAAAUGAAGGGGACUAAAA |
| | Andes Orthohantavirus | | CACAGACCACUGCUUGCUAGAC |
| | Segment L | | |
| | CasM.26 crRNA targeting | 1167 | GCCACCCCAAAAAUGAAGGGGACUAAAA |
| | Dobrava-Begrade | | CAUAAGGUGACGUCCUAAACCA |
| | orthohantavirus Segment S | | |
| | CasM.26 crRNA targeting | 1168 | GCCACCCCAAAAAUGAAGGGGACUAAAA |
| | Dobrava-Begrade | | CAGUGACGUCCUAAACCACCCU |
| | orthohantavirus Segment S | | |
| | CasM.26 crRNA targeting | 1169 | GCCACCCCAAAAAUGAAGGGGACUAAAA |
| | Dobrava-Begrade | | CAAGUCACUUAAGGUGACGUCC |
| | orthohantavirus Segment S | | |
| | CasM.26 crRNA targeting | 1170 | GCCACCCCAAAAAUGAAGGGGACUAAAA |
| | Dobrava-Begrade | | CACGUUUAUGCUUACGAAUGGG |
| | orthohantavirus Segment M | | |
| | CasM.26 crRNA targeting | 1171 | GCCACCCCAAAAAUGAAGGGGACUAAAA |
| | Dobrava-Begrade | | CAAUGAGCGUUUAUGCUUACGA |
| | orthohantavirus Segment M | | |
| | CasM.26 crRNA targeting | 1172 | GCCACCCCAAAAAUGAAGGGGACUAAAA |
| | Dobrava-Begrade | | CAGUAUGCUCCGCAAGAUAUAG |
| | orthohantavirus Segment M | | |
| | CasM.26 crRNA targeting | 1173 | GCCACCCCAAAAAUGAAGGGGACUAAAA |
| | Dobrava-Begrade | | CAGGGAAUCAGGUACCACAUCC |
| | orthohantavirus Segment L | | |
| | CasM.26 crRNA targeting | 1174 | GCCACCCCAAAAAUGAAGGGGACUAAAA |
| | Dobrava-Begrade | | CAGUCUACGUAAGAGAACUAUA |
| | orthohantavirus Segment L | | |
| | CasM.26 crRNA targeting | 1175 | GCCACCCCAAAAAUGAAGGGGACUAAAA |
| | Dobrava-Begrade | | CAGUAGUAUGCUCCGGAAAAUG |
| | orthohantavirus Segment L | | |
| | CasM.26 crRNA targeting | 1176 | GCCACCCCAAAAAUGAAGGGGACUAAAA |
| | Hantaan orthohantavirus | | CACCACCCACAACGGAUUAACU |
| | Segment S | | |
| | CasM.26 crRNA targeting | 1177 | GCCACCCCAAAAAUGAAGGGGACUAAAA |
| | Hantaan orthohantavirus | | CAGCUAAACCCACCCACAACGG |
| | Segment S | | |
| | CasM.26 crRNA targeting | 1178 | GCCACCCCAAAAAUGAAGGGGACUAAAA |
| | Hantaan orthohantavirus | | CAGGCUACUUAAGGUAGCCUGG |
| | Segment S | | |
| | CasM.26 crRNA targeting | 1179 | GCCACCCCAAAAAUGAAGGGGACUAAAA |
| | Hantaan orthohantavirus | | CACGGGACAGAGAAUGCUUAGU |
| | Segment M | | |
| | CasM.26 crRNA targeting | 1180 | GCCACCCCAAAAAUGAAGGGGACUAAAA |
| | Hantaan orthohantavirus | | CAGCUUCCUUACGGGACAGAGA |
| | Segment M | | |
| | CasM.26 crRNA targeting | 1181 | GCCACCCCAAAAAUGAAGGGGACUAAAA |
| | Hantaan orthohantavirus | | CAGUAGACACCGCAAGAUGUUA |
| | Segment M | | |
| | CasM.26 crRNA targeting | 1182 | GCCACCCCAAAAAUGAAGGGGACUAAAA |
| | Hantaan orthohantavirus | | CAUCUAUCGAGACUUUCGAACU |
| | Segment L | | |
| | CasM.26 crRNA targeting | 1183 | GCCACCCCAAAAAUGAAGGGGACUAAAA |
| | Hantaan orthohantavirus | | CACGAGACUUUCGAACUGGUCA |
| | Segment L | | |
| | CasM.26 crRNA targeting | 1184 | GCCACCCCAAAAAUGAAGGGGACUAAAA |
| | Hantaan orthohantavirus | | CAGUAGUAGUAUGCUCCGGAAA |
| | Segment L | | |
| | CasM.26 crRNA targeting | 1185 | GCCACCCCAAAAAUGAAGGGGACUAAAA |
| | Puumala orthohantavirus | | CAUCACAUUGUUGGGCCCACUA |
| | Segment S | | |
| | CasM.26 crRNA targeting | 1186 | GCCACCCCAAAAAUGAAGGGGACUAAAA |
| | Puumala orthohantavirus | | CACAUGUUGAGGUAGUAAAUUG |
| | Segment S | | |
| | CasM.26 crRNA targeting | 1187 | GCCACCCCAAAAAUGAAGGGGACUAAAA |
| | Puumala orthohantavirus | | CAGGCUGGUAACAAUAACAAGC |
| | Segment S | | |
| | CasM.26 crRNA targeting | 1188 | GCCACCCCAAAAAUGAAGGGGACUAAAA |
| | Puumala orthohantavirus | | CAUAGUAUGCUCCGCAGGAACA |
| | Segment M | | |
| | CasM.26 crRNA targeting | 1189 | GCCACCCCAAAAAUGAAGGGGACUAAAA |
| | Puumala orthohantavirus | | CAUUUGCAUAACUAGGCCUACG |
| | Segment M | | |
| | CasM.26 crRNA targeting | 1190 | GCCACCCCAAAAAUGAAGGGGACUAAAA |
| | Puumala orthohantavirus | | CAGGCAUAAUCGGUAUGGAGUA |
| | Segment M | | |
| | CasM.26 crRNA targeting | 1191 | GCCACCCCAAAAAUGAAGGGGACUAAAA |
| | Puumala orthohantavirus | | CAUAUGCUCCGAGAAAAGAGCG |
| | Segment L | | |
| | CasM.26 crRNA targeting | 1192 | GCCACCCCAAAAAUGAAGGGGACUAAAA |
| | Puumala orthohantavirus | | CAUAAGGAAUCGGGUAGCACAU |
| | Segment L | | |
| | CasM.26 crRNA targeting | 1193 | GCCACCCCAAAAAUGAAGGGGACUAAAA |
| | Puumala orthohantavirus | | CACGCUUUAACAAGAUAUCAGC |
| | Segment L | | |
| | CasM.26 crRNA targeting | 1194 | GCCACCCCAAAAAUGAAGGGGACUAAAA |
| | Seoul orthohantavirus Segment | | CAAUGGAAGUUGUCCACUGCCU |
| | S | | |
| | CasM.26 crRNA targeting | 1195 | GCCACCCCAAAAAUGAAGGGGACUAAAA |
| | Seoul orthohantavirus Segment | | CACCGAGAUGGAAGUUGUCCAC |
| | S | | |
| | CasM.26 crRNA targeting | 1196 | GCCACCCCAAAAAUGAAGGGGACUAAAA |
| | Seoul orthohantavirus Segment | | CAAUCACCGAGAUGGAAGUUGU |
| | S | | |
| | CasM.26 crRNA targeting | 1197 | GCCACCCCAAAAAUGAAGGGGACUAAAA |
| | Seoul orthohantavirus Segment | | CAAACCAAUUGCCUCGUACCUC |
| | L | | |
| | CasM.26 crRNA targeting | 1198 | GCCACCCCAAAAAUGAAGGGGACUAAAA |
| | Seoul orthohantavirus Segment | | CACCUGCAACCAAUUGCCUCGU |
| | L | | |
| | CasM.26 crRNA targeting | 1199 | GCCACCCCAAAAAUGAAGGGGACUAAAA |
| | Seoul orthohantavirus Segment | | CACGUACCUCUCCAUGAUGCCC |
| | L | | |
| | CasM.26 crRNA targeting | 1200 | GCCACCCCAAAAAUGAAGGGGACUAAAA |
| | Seoul orthohantavirus Segment | | CAGAUGUCAAGACAACACCCCG |
| | M | | |
| | CasM.26 crRNA targeting | 1201 | GCCACCCCAAAAAUGAAGGGGACUAAAA |
| | Seoul orthohantavirus Segment | | CACACUAUGGCCACCUUUCCCG |
| | M | | |
| | CasM.26 crRNA targeting | 1202 | GCCACCCCAAAAAUGAAGGGGACUAAAA |
| | Seoul orthohantavirus Segment | | CAGACAGUAUUUUGUCCUCGUG |
| | M | | |
| | CasM.26 crRNA targeting Sin | 1203 | GCCACCCCAAAAAUGAAGGGGACUAAAA |
| | Nombre orthohantavirus | | CAUAGUAUGCUCCUUGAAAAGC |
| | Segment S | | |
| | CasM.26 crRNA targeting Sin | 1204 | GCCACCCCAAAAAUGAAGGGGACUAAAA |
| | Nombre orthohantavirus | | CAGGUAGAUUGUUGUAAUGAAG |
| | Segment S | | |
| | CasM.26 crRNA targeting Sin | 1205 | GCCACCCCAAAAAUGAAGGGGACUAAAA |
| | Nombre orthohantavirus | | CAAAUGAGGUAGAUUGUUGUAA |
| | Segment S | | |
| | CasM.26 crRNA targeting Sin | 1188 | GCCACCCCAAAAAUGAAGGGGACUAAAA |
| | Nombre orthohantavirus | | CAUAGUAUGCUCCGCAGGAACA |
| | Segment M | | |
| | CasM.26 crRNA targeting Sin | 1206 | GCCACCCCAAAAAUGAAGGGGACUAAAA |
| | Nombre orthohantavirus | | CACCUCGUAAUAAGCAAAUGGG |
| | Segment M | | |
| | CasM.26 crRNA targeting Sin | 1207 | GCCACCCCAAAAAUGAAGGGGACUAAAA |
| | Nombre orthohantavirus | | CAGCUAAAAAGGAGUAUCGAUA |
| | Segment M | | |
| | CasM.26 crRNA targeting Sin | 1208 | GCCACCCCAAAAAUGAAGGGGACUAAAA |
| | Nombre orthohantavirus | | CACGGACCAACCGUUGUGCAUC |
| | Segment L | | |
| | CasM.26 crRNA targeting Sin | 1209 | GCCACCCCAAAAAUGAAGGGGACUAAAA |
| | Nombre orthohantavirus | | CAUUCUCUCGGACCAACCGUUG |
| | Segment L | | |
| | CasM.26 crRNA targeting Sin | 1210 | GCCACCCCAAAAAUGAAGGGGACUAAAA |
| | Nombre orthohantavirus | | CAUAACAACACAUCAACGUGCC |
| | Segment L | | |
| | CasM.26 crRNA targeting | 1211 | GCCACCCCAAAAAUGAAGGGGACUAAAA |
| | Lumpy Skin Disease Virus P32 | | CAUUGUCACUUUUUAAUUCUGG |
| | CasM.26 crRNA targeting | 1212 | GCCACCCCAAAAAUGAAGGGGACUAAAA |
| | Lumpy Skin Disease Virus P32 | | CAGCCUCUUUUGUACAAAGAGC |
| | CasM.26 crRNA targeting | 1213 | GCCACCCCAAAAAUGAAGGGGACUAAAA |
| | Lumpy Skin Disease Virus P32 | | CACUUUUUGCCUCUUUUGUACA |
| | CasM.26 crRNA targeting | 1214 | GCCACCCCAAAAAUGAAGGGGACUAAAA |
| | Mycobacterium bovis 23S | | CAACCGAACGUGGCUAUCCAGC |
| | CasM.26 crRNA targeting | 1215 | GCCACCCCAAAAAUGAAGGGGACUAAAA |
| | Mycobacterium bovis 23S | | CAAGUUUUCGGCCGGUUAGCAC |
| | CasM.26 crRNA targeting | 1216 | GCCACCCCAAAAAUGAAGGGGACUAAAA |
| | Mycobacterium bovis 23S | | CAUCAGCGGUUAUCCUGACCGA |
| | CasM.26 crRNA targeting | 1217 | GCCACCCCAAAAAUGAAGGGGACUAAAA |
| | Escherichia coli 23S | | CACUGUAUCGCGCGCCUUUCCA |
| | CasM.26 crRNA targeting | 1218 | GCCACCCCAAAAAUGAAGGGGACUAAAA |
| | Escherichia coli 23S | | CAUGUCACCCUGUAUCGCGCGC |
| | CasM.26 crRNA targeting | 1219 | GCCACCCCAAAAAUGAAGGGGACUAAAA |
| | Escherichia coli 23S | | CAGGCUGUCACCCUGUAUCGCG |
| | CasM.26 crRNA targeting | 1220 | GCCACCCCAAAAAUGAAGGGGACUAAAA |
| | Cryptococcus neoformans | | CAUACAGUAGUUAGCGCUAUGA |
| | CasM.26 crRNA targeting | 1221 | GCCACCCCAAAAAUGAAGGGGACUAAAA |
| | Cryptococcus neoformans | | CAGUCUUUUGUCACGAGGAUAA |
| | CasM.26 crRNA targeting | 1222 | GCCACCCCAAAAAUGAAGGGGACUAAAA |
| | Cryptococcus neoformans | | CAGCUAUGCAUCCAUGCAUCGC |
| | Cas12 Variant crRNA targeting | 1223 | UAAUUUCUACUAAGUGUAGAUGUCCGAG |
| | Aspergillus 18S | | CGUCAUUGCUGCC |
| | Cas12 Variant crRNA targeting | 1224 | UAAUUUCUACUAAGUGUAGAUGUUCUUC |
| | Aspergillus 18S | | AUCGAUGCCGGAA |
| | Cas12 Variant crRNA targeting | 1225 | UAAUUUCUACUAAGUGUAGAUAGGGCA |
| | Aspergillus 18S | | GCAAUGACGCUCGG |
| | Cas12 Variant crRNA targeting | 1226 | UAAUUUCUACUAAGUGUAGAUUUGUGC |
| | Aspergillus 28S | | GCUAUCGGUCUCCG |
| | Cas12 Variant crRNA targeting | 1227 | UAAUUUCUACUAAGUGUAGAUACAACUC |
| | Aspergillus 28S | | GACUCGUCGAAGG |
| | Cas12 Variant crRNA targeting | 1228 | UAAUUUCUACUAAGUGUAGAUGCCGAAG |
| | Aspergillus 28S | | CGCGUUCCUCGGU |
| | Cas12 Variant crRNA targeting | 1229 | UAAUUUCUACUAAGUGUAGAUUUAUCGC |
| | Aspergillus ITS | | AUUUCGCUGCGUU |
| | Cas12 Variant crRNA targeting | 1230 | UAAUUUCUACUAAGUGUAGAUAAUACCA |
| | Aspergillus ITS | | GGGGGCGCAAUGU |
| | Cas12 Variant crRNA targeting | 1231 | UAAUUUCUACUAAGUGUAGAUCGCAUUU |
| | Aspergillus ITS | | CGCUGCGUUCUUC |
| | Cas12 Variant crRNA targeting | 1232 | UAAUUUCUACUAAGUGUAGAUAGGAUU |
| | Aspergillus flavus | | CGAACCUAUAAUAU |
| | Mitochondrion | | |
| | Cas12 Variant crRNA targeting | 1233 | UAAUUUCUACUAAGUGUAGAUAAUAUU |
| | Aspergillus flavus | | AACAGUAUUCCGCU |
| | Mitochondrion | | |
| | Cas12 Variant crRNA targeting | 1234 | UAAUUUCUACUAAGUGUAGAUUUAAGG |
| | Aspergillus flavus | | CUUACAGGAUUCGA |
| | Mitochondrion | | |
| | Cas12 Variant crRNA targeting | 1235 | UAAUUUCUACUAAGUGUAGAUGUAAGG |
| | Aspergillus fumigatus | | UAACCUUAACUAAU |
| | Mitochondrion | | |
| | Cas12 Variant crRNA targeting | 1236 | UAAUUUCUACUAAGUGUAGAUUCAAUG |
| | Aspergillus fumigatus | | GAAGGUUCUGUUAC |
| | Mitochondrion | | |
| | Cas12 Variant crRNA targeting | 1237 | UAAUUUCUACUAAGUGUAGAUUUUGUA |
| | Aspergillus fumigatus | | UAUAAAGAGGCGAC |
| | Mitochondrion | | |
| | Cas12 Variant crRNA targeting | 1238 | UAAUUUCUACUAAGUGUAGAUUCAUCGA |
| | Candida ITS | | UGCGAGAACCAAG |
| | Cas12 Variant crRNA targeting | 1239 | UAAUUUCUACUAAGUGUAGAUCUUGGU |
| | Candida ITS | | UCUCGCAUCGAUGA |
| | Cas12 Variant crRNA targeting | 1240 | UAAUUUCUACUAAGUGUAGAUUCGAUGC |
| | Candida ITS | | GAGAACCAAGAGA |
| | Cas12 Variant crRNA targeting | 1241 | UAAUUUCUACUAAGUGUAGAUCCUUGCG |
| | Candida 18S | | ACCAUACUCCCCC |
| | Cas12 Variant crRNA targeting | 1242 | UAAUUUCUACUAAGUGUAGAUGGUUAA |
| | Candida 18S | | GACUACGACGGUAU |
| | Cas12 Variant crRNA targeting | 1243 | UAAUUUCUACUAAGUGUAGAUGUCAAA |
| | Candida 18S | | UUAAGCCGCAGGCU |
| | Cas12 Variant crRNA targeting | 1244 | UAAUUUCUACUAAGUGUAGAUUUCGCUA |
| | Candida 28S | | UCGGUCUCUCGCC |
| | Cas12 Variant crRNA targeting | 1245 | UAAUUUCUACUAAGUGUAGAUCCCUUUC |
| | Candida 28S | | AACAAUUUCACGU |
| | Cas12 Variant crRNA targeting | 1246 | UAAUUUCUACUAAGUGUAGAUAUUCCCA |
| | Candida 28S | | AACAACUCGACUC |
| | Cas12 Variant crRNA targeting | 1247 | UAAUUUCUACUAAGUGUAGAUCGACAAC |
| | Candida Mitochondrion | | AAUGUAACGCCUG |
| | Cas12 Variant crRNA targeting | 1248 | UAAUUUCUACUAAGUGUAGAUGGGGAC |
| | Candida Mitochondrion | | UUGCCGAUUAGUCA |
| | Cas12 Variant crRNA targeting | 1249 | UAAUUUCUACUAAGUGUAGAUUGAUGA |
| | Candida Mitochondrion | | GUGAUUAGUGCGAA |
| | Cas12 Variant crRNA targeting | 1250 | UAAUUUCUACUAAGUGUAGAUACGGGG |
| | Candida albicans ERG11 | | UUGCCAAUGUUAUG |
| | Cas12 Variant crRNA targeting | 1251 | UAAUUUCUACUAAGUGUAGAUACCUCAU |
| | Candida albicans ERG11 | | UAUUGGAGACGUG |
| | Cas12 Variant crRNA targeting | 1252 | UAAUUUCUACUAAGUGUAGAUAACUACU |
| | Candida albicans ERG11 | | CCAGUUUUCGGUA |
| | Cas12 Variant crRNA targeting | 1253 | UAAUUUCUACUAAGUGUAGAUAGUUUU |
| | Candida lusitaniae ERG9 | | GGCUCGUUUCGCCG |
| | Cas12 Variant crRNA targeting | 1254 | UAAUUUCUACUAAGUGUAGAUGUCGUU |
| | Candida lusitaniae ERG9 | | AAUGCACUCGACAC |
| | Cas12 Variant crRNA targeting | 1255 | UAAUUUCUACUAAGUGUAGAUACGACUU |
| | Candida lusitaniae ERG9 | | GGUUUUGAACGCG |
| | Cas12 Variant crRNA targeting | 1256 | UAAUUUCUACUAAGUGUAGAUGGUGCCG |
| | Clostridium difficile 16S | | CACUAACGCAUUA |
| | Cas12 Variant crRNA targeting | 1257 | UAAUUUCUACUAAGUGUAGAUGUACAG |
| | Clostridium difficile 16S | | GAUGGACCCGCGUC |
| | Cas12 Variant crRNA targeting | 1258 | UAAUUUCUACUAAGUGUAGAUUAAUCG |
| | Clostridium difficile 16S | | GAGAGUUCCCUUCG |
| | Cas12 Variant crRNA targeting | 1259 | UAAUUUCUACUAAGUGUAGAUCGGGAA |
| | Clostridium perfringens 16S | | ACGGAUUAGCGGCG |
| | Cas12 Variant crRNA targeting | 1260 | UAAUUUCUACUAAGUGUAGAUAAUCGA |
| | Clostridium perfringens 16S | | GGAAAUCCCUUCGG |
| | Cas12 Variant crRNA targeting | 1261 | UAAUUUCUACUAAGUGUAGAUCUAACGC |
| | Clostridium perfringens 16S | | AUUAAGUAUUCCG |
| | Cas12 Variant crRNA targeting | 1262 | UAAUUUCUACUAAGUGUAGAUAGGCGAC |
| | Clostridium tetani 16S | | GUAGGGUAGCCGA |
| | Cas12 Variant crRNA targeting | 1263 | UAAUUUCUACUAAGUGUAGAUAAGAGG |
| | Clostridium tetani 16S | | GGAAUAGCCCUCCG |
| | Cas12 Variant crRNA targeting | 1264 | UAAUUUCUACUAAGUGUAGAUAGAUGG |
| | Clostridium tetani 16S | | GCCCGCGCCCCAUU |
| | Cas12 Variant crRNA targeting | 1265 | UAAUUUCUACUAAGUGUAGAUUCGCGUC |
| | Corynebacterium 16S | | GUCUGUGAAAUUC |
| | Cas12 Variant crRNA targeting | 1266 | UAAUUUCUACUAAGUGUAGAUGUUUUA |
| | Corynebacterium 16S | | GCCUUGCGGCCGUA |
| | Cas12 Variant crRNA targeting | 941 | UAAUUUCUACUAAGUGUAGAUUCUGCGA |
| | Corynebacterium 16S | | UUACUAGCGACUC |
| | Cas12 Variant crRNA targeting | 1267 | UAAUUUCUACUAAGUGUAGAUAGACGU |
| | Corynebacterium rpoB | | UCACGCUUCUCACU |
| | Cas12 Variant crRNA targeting | 1268 | UAAUUUCUACUAAGUGUAGAUAGUGAG |
| | Corynebacterium rpoB | | AAGCGUGAACGUCU |
| | Cas12 Variant crRNA targeting | 1269 | UAAUUUCUACUAAGUGUAGAUGAGCGCA |
| | Corynebacterium rpoB | | CCAACCAGGGCAC |
| | Cas12 Variant crRNA targeting | 1270 | UAAUUUCUACUAAGUGUAGAUAGAGUA |
| | Corynebacterium tox | | UCCCGCAGCGUCGU |
| | Cas12 Variant crRNA targeting | 1271 | UAAUUUCUACUAAGUGUAGAUACAAUA |
| | Corynebacterium tox | | AAUACGACGCUGCG |
| | Cas12 Variant crRNA targeting | 1272 | UAAUUUCUACUAAGUGUAGAUUACAUCG |
| | Corynebacterium tox | | CAUCUUGGCCACG |
| | Cas12 Variant crRNA targeting | 1273 | UAAUUUCUACUAAGUGUAGAUCGGCGAA |
| | Corynebacterium diphtheriae | | CUAAUCAAUGCAC |
| | chrA | | |
| | Cas12 Variant crRNA targeting | 1274 | UAAUUUCUACUAAGUGUAGAUCCGCAGG |
| | Corynebacterium diphtheriae | | UCGGAGAUAUAAG |
| | chrA | | |
| | Cas12 Variant crRNA targeting | 1275 | UAAUUUCUACUAAGUGUAGAUAACGGCC |
| | Corynebacterium diphtheriae | | GGUUUGGAAGCGA |
| | chrA | | |
| | Cas12 Variant crRNA targeting | 1276 | UAAUUUCUACUAAGUGUAGAUGGACGCG |
| | Corynebacterium | | CGAGUUAAUGAUC |
| | pseudotuberculosis pld | | |
| | Cas12 Variant crRNA targeting | 1277 | UAAUUUCUACUAAGUGUAGAUCGUAAG |
| | Corynebacterium | | UCCAGCGAAGCUCG |
| | pseudotuberculosis pld | | |
| | Cas12 Variant crRNA targeting | 1278 | UAAUUUCUACUAAGUGUAGAUAAGAUC |
| | Corynebacterium | | AUUAACUCGCGCGU |
| | pseudotuberculosis pld | | |
| | Cas12 Variant crRNA targeting | 1279 | UAAUUUCUACUAAGUGUAGAUCGCGUAG |
| | Corynebacterium | | UUGCGAUGCGGUG |
| | striatum chrA | | |
| | Cas12 Variant crRNA targeting | 1280 | UAAUUUCUACUAAGUGUAGAUGCAGUCC |
| | Corynebacterium | | CCGACGCGAUAAA |
| | striatum chrA | | |
| | Cas12 Variant crRNA targeting | 1281 | UAAUUUCUACUAAGUGUAGAUGACGCGA |
| | Corynebacterium | | UAAAACGCAACCU |
| | striatum chrA | | |
| | Cas12 Variant crRNA targeting | 1282 | UAAUUUCUACUAAGUGUAGAUGCGGACC |
| | Corynebacterium ulcerans pld | | GACGCAUGACGUG |
| | Cas12 Variant crRNA targeting | 1283 | UAAUUUCUACUAAGUGUAGAUAGCGGAC |
| | Corynebacterium ulcerans pld | | CGACGCAUGACGU |
| | Cas12 Variant crRNA targeting | 1284 | UAAUUUCUACUAAGUGUAGAUCGCGACU |
| | Corynebacterium ulcerans pld | | UAGCACGCAAAUA |
| | Cas12 Variant crRNA targeting | 1285 | UAAUUUCUACUAAGUGUAGAUCUCGCGG |
| | Campylobacteraceae 16S | | UAUUGCGUCUCAU |
| | Cas12 Variant crRNA targeting | 1286 | UAAUUUCUACUAAGUGUAGAUGCUCGUU |
| | Campylobacteraceae 16S | | GCGGGACUUAACC |
| | Cas12 Variant crRNA targeting | 1287 | UAAUUUCUACUAAGUGUAGAUGACCGUA |
| | Campylobacteraceae 16S | | CUCCCCAGGCGGU |
| | Cas12 Variant crRNA targeting | 1288 | UAAUUUCUACUAAGUGUAGAUGCGUCGA |
| | Campylobacteraceae 23S | | AGGUAUACCGGUA |
| | Cas12 Variant crRNA targeting | 1289 | UAAUUUCUACUAAGUGUAGAUGACUGCG |
| | Campylobacteraceae 23S | | AUAAGCUACGGGG |
| | Cas12 Variant crRNA targeting | 1290 | UAAUUUCUACUAAGUGUAGAUAUGUUG |
| | Campylobacteraceae 23S | | CCCGUACCGUAAAC |
| | Cas12 Variant crRNA targeting | 1291 | UAAUUUCUACUAAGUGUAGAUACGGUAC |
| | Campylobacteraceae flaG | | CUAAGGAAUAAGC |
| | Cas12 Variant crRNA targeting | 1292 | UAAUUUCUACUAAGUGUAGAUAAUAAG |
| | Campylobacteraceae flaG | | UGAUCGAUUGAGCC |
| | Cas12 Variant crRNA targeting | 1293 | UAAUUUCUACUAAGUGUAGAUGAAGUG |
| | Campylobacteraceae flaG | | GAUUAGUGGCGCAC |
| | Cas12 Variant crRNA targeting | 1294 | UAAUUUCUACUAAGUGUAGAUCUGUAUC |
| | Escherichia coli 23S | | GCGCGCCUUUCCA |
| | Cas12 Variant crRNA targeting | 1295 | UAAUUUCUACUAAGUGUAGAUUAUCGCG |
| | Escherichia coli 23S | | CGCCUUUCCAGAC |
| | Cas12 Variant crRNA targeting | 1296 | UAAUUUCUACUAAGUGUAGAUUGUCACC |
| | Escherichia coli 23S | | CUGUAUCGCGCGC |
| | Cas12 Variant crRNA targeting | 1297 | UAAUUUCUACUAAGUGUAGAUAUCGUA |
| | Escherichia coli O157:H1 | | UACGCGCUGUAUCU |
| | pO157 | | |
| | Cas12 Variant crRNA targeting | 1298 | UAAUUUCUACUAAGUGUAGAUGCCAUCG |
| | Escherichia coli O157:H1 | | CGUUGUCAUACGA |
| | pO157 | | |
| | Cas12 Variant crRNA targeting | 1299 | UAAUUUCUACUAAGUGUAGAUGUCGCUC |
| | Escherichia coli O157:H1 | | CGUAUAGGCCAGU |
| | pO157 | | |
| | Cas12 Variant crRNA targeting | 1300 | UAAUUUCUACUAAGUGUAGAUAGCCAUC |
| | Escherichia coli O157:H1 | | GCGUUGUCAUACG |
| | stx2A | | |
| | Cas12 Variant crRNA targeting | 1297 | UAAUUUCUACUAAGUGUAGAUAUCGUA |
| | Escherichia coli O157:H1 | | UACGCGCUGUAUCU |
| | stx2A | | |
| | Cas12 Variant crRNA targeting | 1299 | UAAUUUCUACUAAGUGUAGAUGUCGCUC |
| | Escherichia coli O157:H1 | | CGUAUAGGCCAGU |
| | stx2A | | |
| | Cas12 Variant crRNA targeting | 1301 | UAAUUUCUACUAAGUGUAGAUCGGAGCG |
| | Shigella Virulence Factor | | UUGUCGUAACAGU |
| | mxiM | | |
| | Cas12 Variant crRNA targeting | 1302 | UAAUUUCUACUAAGUGUAGAUGCGUUG |
| | Shigella Virulence Factor | | GGUGUGGAUCACUA |
| | mxiM | | |
| | Cas12 Variant crRNA targeting | 1303 | UAAUUUCUACUAAGUGUAGAUCUCUUAA |
| | Shigella Virulence Factor | | AACGAUAGUGGCU |
| | mxiM | | |
| | Cas12 Variant crRNA targeting | 1304 | UAAUUUCUACUAAGUGUAGAUAAAAAC |
| | Shigella Virulence Factor | | UUCGCGCAAAAACC |
| | ospC1 | | |
| | Cas12 Variant crRNA targeting | 1305 | UAAUUUCUACUAAGUGUAGAUUGAUCA |
| | Shigella Virulence Factor | | UGACUCUCCAUAUG |
| | ospC1 | | |
| | Cas12 Variant crRNA targeting | 1306 | UAAUUUCUACUAAGUGUAGAUUCCACCU |
| | Shigella Virulence Factor | | GUUUUUUACCAUG |
| | ospC1 | | |
| | Cas12 Variant crRNA targeting | 1307 | UAAUUUCUACUAAGUGUAGAUAAUAGC |
| | Shiga Toxin stx | | GCGGUUUGACUUAC |
| | Cas12 Variant crRNA targeting | 1308 | UAAUUUCUACUAAGUGUAGAUGUGCGAC |
| | Shiga Toxin stx | | CCCAAUAGCGCGG |
| | Cas12 Variant crRNA targeting | 1309 | UAAUUUCUACUAAGUGUAGAUGGUUAA |
| | Shiga Toxin stx | | CCCAAUCGGCUUCA |
| | Cas12 Variant crRNA targeting | 1310 | UAAUUUCUACUAAGUGUAGAUACGGGG |
| | Listeria monocytogenes 16S | | GCCGCACAAGCGGU |
| | Cas12 Variant crRNA targeting | 1311 | UAAUUUCUACUAAGUGUAGAUGGGAUA |
| | Listeria monocytogenes 16S | | ACUCCGGGAAACCG |
| | Cas12 Variant crRNA targeting | 1312 | UAAUUUCUACUAAGUGUAGAUAACGAAC |
| | Listeria monocytogenes 16S | | GGAGGAAGAGCUU |
| | Cas12 Variant crRNA targeting | 1313 | UAAUUUCUACUAAGUGUAGAUAGUCGG |
| | Listeria monocytogenes 23S | | AUAGUAUCCUUACG |
| | Cas12 Variant crRNA targeting | 1314 | UAAUUUCUACUAAGUGUAGAUAGCGGA |
| | Listeria monocytogenes 23S | | AAAAGCGGAGCCGU |
| | Cas12 Variant crRNA targeting | 1315 | UAAUUUCUACUAAGUGUAGAUAAGACG |
| | Listeria monocytogenes 23S | | GUAACAGCCCGGUA |
| | Cas12 Variant crRNA targeting | 1316 | UAAUUUCUACUAAGUGUAGAUAUCUACC |
| | Listeria monocytogenes prfA | | GGAUCUACCGGAU |
| | Cas12 Variant crRNA targeting | 1317 | UAAUUUCUACUAAGUGUAGAUGUAGAU |
| | Listeria monocytogenes prfA | | CCGGUAGAUCCGGU |
| | Cas12 Variant crRNA targeting | 1318 | UAAUUUCUACUAAGUGUAGAUGCUUAAC |
| | Listeria monocytogenes prfA | | CGGGGAGGGUCAU |
| | Cas12 Variant crRNA targeting | 1319 | UAAUUUCUACUAAGUGUAGAUACAACGC |
| | Mycobacterium bovis 16S | | UCGCACCCUACGU |
| | Cas12 Variant crRNA targeting | 1320 | UAAUUUCUACUAAGUGUAGAUCGUCGCC |
| | Mycobacterium bovis 16S | | UUGGUAGGCCGUC |
| | Cas12 Variant crRNA targeting | 1321 | UAAUUUCUACUAAGUGUAGAUCGUCAAU |
| | Mycobacterium bovis 16S | | CCGAGAGAACCCG |
| | Cas12 Variant crRNA targeting | 1322 | UAAUUUCUACUAAGUGUAGAUGAUGACC |
| | Mycobacterium bovis 23S | | GAUAGCGGAUUAG |
| | Cas12 Variant crRNA targeting | 1323 | UAAUUUCUACUAAGUGUAGAUUCAACCG |
| | Mycobacterium bovis 23S | | AGCGUGGAUCCGA |
| | Cas12 Variant crRNA targeting | 1324 | UAAUUUCUACUAAGUGUAGAUGCACGAG |
| | Mycobacterium bovis 23S | | UGAUGUCGUGCUA |
| | Cas12 Variant crRNA targeting | 1325 | UAAUUUCUACUAAGUGUAGAUAGCGGCC |
| | Neisseria meningitidis 16S | | GAUAUCUGAUUAG |
| | Cas12 Variant crRNA targeting | 1326 | UAAUUUCUACUAAGUGUAGAUUCGGGCC |
| | Neisseria meningitidis 16S | | UUGCGCUAUUCGA |
| | Cas12 Variant crRNA targeting | 1327 | UAAUUUCUACUAAGUGUAGAUACAUGU |
| | Neisseria meningitidis 16S | | ACGGAAUCCUCCGG |
| | Cas12 Variant crRNA targeting | 1328 | UAAUUUCUACUAAGUGUAGAUUACGUA |
| | Neisseria meningitidis 23S | | AUAACUGUCGAGAU |
| | Cas12 Variant crRNA targeting | 1329 | UAAUUUCUACUAAGUGUAGAUCAACAGC |
| | Neisseria meningitidis 23S | | GGUACUAAGCGUA |
| | Cas12 Variant crRNA targeting | 1330 | UAAUUUCUACUAAGUGUAGAUACAGCGG |
| | Neisseria meningitidis 23S | | UACUAAGCGUACG |
| | Cas12 Variant crRNA targeting | 1331 | UAAUUUCUACUAAGUGUAGAUCGUACAC |
| | Salmonella enterica Paratyphi | | AAAAGCGCAUGUG |
| | 23S | | |
| | Cas12 Variant crRNA targeting | 1332 | UAAUUUCUACUAAGUGUAGAUUACACAA |
| | Salmonella enterica Paratyphi | | AAGCGCAUGUGCU |
| | 23S | | |
| | Cas12 Variant crRNA targeting | 1333 | UAAUUUCUACUAAGUGUAGAUAGAGCCU |
| | Salmonella enterica Paratyphi | | GAAUCAGCAUGUG |
| | 23S | | |
| | Cas12 Variant crRNA targeting | 1334 | UAAUUUCUACUAAGUGUAGAUUCGCGUA |
| | Salmonella enterica Paratyphi | | GUCGGAAUCUUCG |
| | filC | | |
| | Cas12 Variant crRNA targeting | 1335 | UAAUUUCUACUAAGUGUAGAUAUACACG |
| | Salmonella enterica Paratyphi | | GUCGAUUUCGUUC |
| | filC | | |
| | Cas12 Variant crRNA targeting | 1336 | UAAUUUCUACUAAGUGUAGAUAACGGU |
| | Salmonella enterica Paratyphi | | UCUGAACCGCACCC |
| | filC | | |
| | Cas12 Variant crRNA targeting | 1337 | UAAUUUCUACUAAGUGUAGAUGAUACG |
| | Salmonella enterica Typhi | | GGAUCGAUAAUUGC |
| | segment 2/20 | | |
| | Cas12 Variant crRNA targeting | 1338 | UAAUUUCUACUAAGUGUAGAUCCGUAUU |
| | Salmonella enterica Typhi | | CUUACCCACCGUA |
| | segment 2/20 | | |
| | Cas12 Variant crRNA targeting | 1339 | UAAUUUCUACUAAGUGUAGAUCGCCGUA |
| | Salmonella enterica Typhi | | UUCUUACCCACCG |
| | segment 2/20 | | |
| | Cas12 Variant crRNA targeting | 1340 | UAAUUUCUACUAAGUGUAGAUACGGCAG |
| | Salmonella enterica Typhi | | CACCCACGCGGCA |
| | segment | | |
| | Cas12 Variant crRNA targeting | 1341 | UAAUUUCUACUAAGUGUAGAUGGCUACA |
| | Salmonella enterica Typhi | | GGAGCUGUCGGUA |
| | segment | | |
| | Cas12 Variant crRNA targeting | 1342 | UAAUUUCUACUAAGUGUAGAUUACUCCC |
| | Salmonella enterica Typhi | | UCUUUACGCGCAG |
| | segment | | |
| | Cas12 Variant crRNA targeting | 1343 | UAAUUUCUACUAAGUGUAGAUUAGUAG |
| | Salmonella enterica | | CGAAUGCUGAAGUU |
| | Typhimurium section 43/220 | | |
| | Cas12 Variant crRNA targeting | 1344 | UAAUUUCUACUAAGUGUAGAUGUAGCG |
| | Salmonella enterica | | AAUGCUGAAGUUGA |
| | Typhimurium section 43/220 | | |
| | Cas12 Variant crRNA targeting | 1345 | UAAUUUCUACUAAGUGUAGAUAAGUUG |
| | Salmonella enterica | | AUAACCCACUAAGU |
| | Typhimurium section 43/220 | | |
| | Cas12 Variant crRNA targeting | 1346 | UAAUUUCUACUAAGUGUAGAUUAAGCG |
| | Salmonella enterica | | AAGCGCCAUCAGGC |
| | Typhimurium section 217/220 | | |
| | Cas12 Variant crRNA targeting | 1347 | UAAUUUCUACUAAGUGUAGAUGCGAAUC |
| | Salmonella enterica | | AAUACAGAAUGCC |
| | Typhimurium section 217/220 | | |
| | Cas12 Variant crRNA targeting | 1348 | UAAUUUCUACUAAGUGUAGAUAUUGUU |
| | Salmonella enterica | | AGCGAAUCAAUACA |
| | Typhimurium section 217/220 | | |
| | Cas12 Variant crRNA targeting | 1349 | UAAUUUCUACUAAGUGUAGAUCGUUACA |
| | Salmonella enterica | | AUAAGCCUGGUGG |
| | Typhimurium section 99/220 | | |
| | Cas12 Variant crRNA targeting | 1350 | UAAUUUCUACUAAGUGUAGAUCCCACGU |
| | Salmonella enterica | | UACAAUAAGCCUG |
| | Typhimurium section 99/220 | | |
| | Cas12 Variant crRNA targeting | 1351 | UAAUUUCUACUAAGUGUAGAUCACGUUA |
| | Salmonella enterica | | CAAUAAGCCUGGU |
| | Typhimurium section 99/220 | | |
| | Cas12 Variant crRNA targeting | 1352 | UAAUUUCUACUAAGUGUAGAUUCACUCC |
| | Salmonella enterica Enteritides | | CUCUGGCCGCAGA |
| | difference region 1 | | |
| | Cas12 Variant crRNA targeting | 1353 | UAAUUUCUACUAAGUGUAGAUGGCAGCC |
| | Salmonella enterica Enteritides | | GUCACUCCCUCUG |
| | difference region 1 | | |
| | Cas12 Variant crRNA targeting | 1354 | UAAUUUCUACUAAGUGUAGAUGCCCGGC |
| | Salmonella enterica Enteritides | | AGCCGUCACUCCC |
| | difference region 1 | | |
| | Cas12 Variant crRNA targeting | 1355 | UAAUUUCUACUAAGUGUAGAUGGCAUUC |
| | Salmonella enterica Enteritides | | UGGGAUCAGAUAC |
| | caiC | | |
| | Cas12 Variant crRNA targeting | 1356 | UAAUUUCUACUAAGUGUAGAUGGGCAU |
| | Salmonella enterica Enteritides | | UCUGGGAUCAGAUA |
| | caiC | | |
| | Cas12 Variant crRNA targeting | 1357 | UAAUUUCUACUAAGUGUAGAUGAUACG |
| | Salmonella enterica Enteritides | | UAAAUAUCAGGCGA |
| | caiC | | |
| | Cas12 Variant crRNA targeting | 1358 | UAAUUUCUACUAAGUGUAGAUGACGUA |
| | Salmonella enterica Enteritides | | GGCGCGAGCUUCUU |
| | acrR | | |
| | Cas12 Variant crRNA targeting | 1359 | UAAUUUCUACUAAGUGUAGAUAUCAAAC |
| | Salmonella enterica Enteritides | | GAUUGCGGAGCAA |
| | acrR | | |
| | Cas12 Variant crRNA targeting | 1360 | UAAUUUCUACUAAGUGUAGAUCAGGGG |
| | Salmonella enterica Enteritides | | GAGCCGUUGAACGU |
| | acrR | | |
| | Cas12 Variant crRNA targeting | 1361 | UAAUUUCUACUAAGUGUAGAUGUUUUU |
| | Salmonella enterica Enteritides | | UAACUCGCCGCCAG |
| | citT | | |
| | Cas12 Variant crRNA targeting | 1362 | UAAUUUCUACUAAGUGUAGAUCGGUCAU |
| | Salmonella enterica Enteritides | | CAAGAACCUGCCA |
| | citT | | |
| | Cas12 Variant crRNA targeting | 1363 | UAAUUUCUACUAAGUGUAGAUGCCACCG |
| | Salmonella enterica Enteritides | | CUGUUUAAAUCGU |
| | citT | | |
| | Cas12 Variant crRNA targeting | 1364 | UAAUUUCUACUAAGUGUAGAUAAUACG |
| | Yersinia enterocolitica 16S | | UUGUUGGAUUGACG |
| | Cas12 Variant crRNA targeting | 1365 | UAAUUUCUACUAAGUGUAGAUGACCAAA |
| | Yersinia enterocolitica 16S | | GUGGGGGACCUUA |
| | Cas12 Variant crRNA targeting | 1366 | UAAUUUCUACUAAGUGUAGAUUUGGAU |
| | Yersinia enterocolitica 16S | | UGACGUUACUCGCA |
| | Cas12 Variant crRNA targeting | 1367 | UAAUUUCUACUAAGUGUAGAUAUAUGA |
| | Yersinia enterocolitica 23S | | AGCGUUAUAACCGA |
| | Cas12 Variant crRNA targeting | 1368 | UAAUUUCUACUAAGUGUAGAUUUAGAU |
| | Yersinia enterocolitica 23S | | GAAUACAUAGUCUA |
| | Cas12 Variant crRNA targeting | 1369 | UAAUUUCUACUAAGUGUAGAUAGAGUC |
| | Yersinia enterocolitica 23S | | UGAAUCAGUUUGUG |
| | Cas12 Variant crRNA targeting | 1370 | UAAUUUCUACUAAGUGUAGAUCUGGAA |
| | Yersinia pseudotuberculosis | | ACGGUGGCUAAUAC |
| | 16S | | |
| | Cas12 Variant crRNA targeting | 1371 | UAAUUUCUACUAAGUGUAGAUGAAACG |
| | Yersinia pseudotuberculosis | | GUGGCUAAUACCGC |
| | 16S | | |
| | Cas12 Variant crRNA targeting | 1372 | UAAUUUCUACUAAGUGUAGAUGGCCUUG |
| | Vibrio cholerae 16S | | CGCUAUCGGAUAU |
| | Cas12 Variant crRNA targeting | 1373 | UAAUUUCUACUAAGUGUAGAUGGAAAU |
| | Vibrio cholerae 16S | | UGCCCGGUAGAGGG |
| | Cas12 Variant crRNA targeting | 1374 | UAAUUUCUACUAAGUGUAGAUUGUUUG |
| | Vibrio cholerae 16S | | CCAGCACGUAAUGG |
| | Cas12 Variant crRNA targeting | 1375 | UAAUUUCUACUAAGUGUAGAUUGUCGCG |
| | Vibrio cholerae hlyA | | GACUCUUAACCGU |
| | Cas12 Variant crRNA targeting | 1376 | UAAUUUCUACUAAGUGUAGAUAUUGAG |
| | Vibrio cholerae hlyA | | CCGCGGUGGUUACG |
| | Cas12 Variant crRNA targeting | 1377 | UAAUUUCUACUAAGUGUAGAUAGAGGG |
| | Vibrio cholerae hlyA | | ACUGUCAACGCGCG |
| | Cas12 Variant crRNA targeting | 1378 | UAAUUUCUACUAAGUGUAGAUAUAGCG |
| | Vibrio parahaemolyticus 16S | | UAUUCGUUUGACGU |
| | Cas12 Variant crRNA targeting | 1379 | UAAUUUCUACUAAGUGUAGAUAUACCGC |
| | Vibrio parahaemolyticus 16S | | AUGAUGCCUACGG |
| | Cas12 Variant crRNA targeting | 1380 | UAAUUUCUACUAAGUGUAGAUAAACUG |
| | Vibrio parahaemolyticus 16S | | GCAGACUAGAGUGC |
| | Cas12 Variant crRNA targeting | 1381 | UAAUUUCUACUAAGUGUAGAUAGAGAA |
| | Vibrio vulnificus 16S | | UCUAGCGGAGACGC |
| | Cas12 Variant crRNA targeting | 1382 | UAAUUUCUACUAAGUGUAGAUUGGCUU |
| | Vibrio vulnificus 16S | | UCGGAGCUAACGCG |
| | Cas12 Variant crRNA targeting | 1383 | UAAUUUCUACUAAGUGUAGAUUCGGGCC |
| | Vibrio vulnificus 16S | | UCUCGCGUCAGGA |
| | Cas12 Variant crRNA targeting | 1384 | UAAUUUCUACUAAGUGUAGAUGGCGCCA |
| | Vibrio vulnificus 23S | | UAGUCUCUGGAUA |
| | Cas12 Variant crRNA targeting | 1385 | UAAUUUCUACUAAGUGUAGAUCGUAGU |
| | Vibrio vulnificus 23S | | UGACGAUGCAUGUU |
| | Cas12 Variant crRNA targeting | 1386 | UAAUUUCUACUAAGUGUAGAUAAUGAA |
| | Vibrio vulnificus 23S | | GCGAACCGGGAGAA |
| | Cas12 Variant crRNA targeting | 1387 | UAAUUUCUACUAAGUGUAGAUCGCGUAG |
| | Cytomegalovirus complete | | AAUCCGUACGGCC |
| | genome | | |
| | Cas12 Variant crRNA targeting | 1388 | UAAUUUCUACUAAGUGUAGAUGACGGCC |
| | Cytomegalovirus complete | | GUACGGAUUCUAC |
| | genoome | | |
| | Cas12 Variant crRNA targeting | 1389 | UAAUUUCUACUAAGUGUAGAUGCUGACU |
| | Cytomegalovirus complete | | GGAACGUCGUACG |
| | genome | | |
| | Cas12 Variant crRNA targeting | 1390 | UAAUUUCUACUAAGUGUAGAUUGGAUG |
| | Goatpox virus P32 | | GGAUACAUAGUAAG |
| | Cas12 Variant crRNA targeting | 1391 | UAAUUUCUACUAAGUGUAGAUCUCUAUU |
| | Goatpox virus P32 | | CCAUAUACCGUUU |
| | Cas12 Variant crRNA targeting | 1392 | UAAUUUCUACUAAGUGUAGAUAUACGU |
| | Goatpox virus P32 | | AAAUAACAUACCUG |
| | Cas12 Variant crRNA targeting | 1390 | UAAUUUCUACUAAGUGUAGAUUGGAUG |
| | Sheeppox virus P32 | | GGAUACAUAGUAAG |
| | Cas12 Variant crRNA targeting | 1393 | UAAUUUCUACUAAGUGUAGAUUUUUAU |
| | Sheeppox virus P32 | | GGCAGACGAUAAUC |
| | Cas12 Variant crRNA targeting | 1391 | UAAUUUCUACUAAGUGUAGAUCUCUAUU |
| | Sheeppox virus P32 | | CCAUAUACCGUUU |
| | Cas12 Variant crRNA targeting | 1394 | UAAUUUCUACUAAGUGUAGAUAAAAUU |
| | Lumpy Skin Disease Virus P32 | | UUCAACACCUCCUG |
| | Cas12 Variant crRNA targeting | 1395 | UAAUUUCUACUAAGUGUAGAUACAAAG |
| | Lumpy Skin Disease Virus P32 | | AGCAUUACAUAAUC |
| | Cas12 Variant crRNA targeting | 1396 | UAAUUUCUACUAAGUGUAGAUCACCUCC |
| | Lumpy Skin Disease Virus P32 | | UGAUUUUUCUACC |
| | Cas12 Variant crRNA targeting | 1397 | UAAUUUCUACUAAGUGUAGAUUCCUAUG |
| | Mycoplasma capricolum | | GGGUGGGGUUGUA |
| | capripneumoniae 23S | | |
| | Cas12 Variant crRNA targeting | 1398 | UAAUUUCUACUAAGUGUAGAUAUAUGA |
| | Mycoplasma capricolum | | UGGGAACCUAGGGA |
| | capripneumoniae 23S | | |
| | Cas12 Variant crRNA targeting | 1399 | UAAUUUCUACUAAGUGUAGAUGUAUGU |
| | Mycoplasma capricolum | | AGUAGUAGACACGA |
| | capripneumoniae 23S | | |
| | Cas12 Variant crRNA targeting | 1400 | UAAUUUCUACUAAGUGUAGAUGGUUCGC |
| | Mycoplasma capricolum | | CUUGAAGACUGUU |
| | capripneumoniae 16S | | |
| | Cas12 Variant crRNA targeting | 1401 | UAAUUUCUACUAAGUGUAGAUAAGACU |
| | Mycoplasma capricolum | | GUUUUACUAGAAUG |
| | capripneumoniae 16S | | |
| | Cas12 Variant crRNA targeting | 1402 | UAAUUUCUACUAAGUGUAGAUUAAGGG |
| | Mycoplasma capricolum | | AAGAAAAAAUAGAG |
| | capripneumoniae 16S | | |
| | Cas12 Variant crRNA targeting | 1403 | UAAUUUCUACUAAGUGUAGAUAUGCUCU |
| | Mycoplasma capricolum | | ACCGUGAUCUCUA |
| | capripneumoniae L22 | | |
| | Cas12 Variant crRNA targeting | 1404 | UAAUUUCUACUAAGUGUAGAUGAGAGA |
| | Mycoplasma capricolum | | UACGAAUCAUACUU |
| | capripneumoniae L22 | | |
| | Cas12 Variant crRNA targeting | 1405 | UAAUUUCUACUAAGUGUAGAUAGUAGC |
| | Mycoplasma capricolum | | AACUGCAACUGAUA |
| | capripneumoniae L22 | | |
| | Cas12 Variant crRNA targeting | 1406 | UAAUUUCUACUAAGUGUAGAUUAGGAC |
| | Mycoplasma mycoides | | UUUUUAAGAGUUAG |
| | mycoides 23S | | |
| | Cas12 Variant crRNA targeting | 1407 | UAAUUUCUACUAAGUGUAGAUCCUGCGA |
| | Mycoplasma mycoides | | UAAGUUUGGGGGA |
| | mycoides 23S | | |
| | Cas12 Variant crRNA targeting | 1408 | UAAUUUCUACUAAGUGUAGAUUAAUUU |
| | Mycoplasma mycoides | | AUGCACAGCAGUCA |
| | mycoides 23S | | |
| | Cas12 Variant crRNA targeting | 1409 | UAAUUUCUACUAAGUGUAGAUGUUCGU |
| | Mycoplasma mycoides | | GCCGUAAGGUGUUG |
| | mycoides 16S | | |
| | Cas12 Variant crRNA targeting | 1410 | UAAUUUCUACUAAGUGUAGAUGUCGCUA |
| | Mycoplasma mycoides | | GUUACUAACAUUA |
| | mycoides 16S | | |
| | Cas12 Variant crRNA targeting | 1411 | UAAUUUCUACUAAGUGUAGAUCUGUUG |
| | Mycoplasma mycoides | | UAAGGGAAGAAAAA |
| | mycoides 16S | | |
| | Cas12 Variant crRNA targeting | 1412 | UAAUUUCUACUAAGUGUAGAUACGGAA |
| | Mycoplasma mycoides | | UAAAAGAAUGGGGA |
| | mycoides lppB | | |
| | Cas12 Variant crRNA targeting | 1413 | UAAUUUCUACUAAGUGUAGAUCAGUUG |
| | Mycoplasma mycoides | | GAGCUAACCAAAAC |
| | mycoides lppB | | |
| | Cas12 Variant crRNA targeting | 1414 | UAAUUUCUACUAAGUGUAGAUUUUGAU |
| | Mycoplasma mycoides | | CUGCCUUAAAGGUA |
| | mycoides lppB | | |
| | Cas12 Variant crRNA targeting | 1415 | UAAUUUCUACUAAGUGUAGAUUGUAAA |
| | Enterobacter cloacae | | GCCGCCCUCUCGGC |
| | Cas12 Variant crRNA targeting | 1416 | UAAUUUCUACUAAGUGUAGAUUAAGCGC |
| | Enterobacter cloacae | | AGCGCCACCGGGC |
| | Cas12 Variant crRNA targeting | 1417 | UAAUUUCUACUAAGUGUAGAUGGUGAG |
| | Enterobacter cloacae | | GGCAUCAGGCCGCA |
| | Cas12 Variant crRNA targeting | 1418 | UAAUUUCUACUAAGUGUAGAUCAGCGAC |
| | Klebsiella oxytoca | | UCGGAUUCCGACA |
| | Cas12 Variant crRNA targeting | 1419 | UAAUUUCUACUAAGUGUAGAUAGCCCGG |
| | Klebsiella oxytoca | | ACAGAUGCGCAGC |
| | Cas12 Variant crRNA targeting | 1420 | UAAUUUCUACUAAGUGUAGAUCAGUGAC |
| | Klebsiella oxytoca | | UCGGAUUCGGACA |
| | Cas12 Variant crRNA targeting | 1421 | UAAUUUCUACUAAGUGUAGAUGUUACUC |
| | Klebsiella pneumoniae | | UCCGGACUCCGCA |
| | Cas12 Variant crRNA targeting | 1422 | UAAUUUCUACUAAGUGUAGAUCAGCCAC |
| | Klebsiella pneumoniae | | UCUGCCGGUAUGU |
| | Cas12 Variant crRNA targeting | 1423 | UAAUUUCUACUAAGUGUAGAUCCCCGCU |
| | Klebsiella pneumoniae | | GGCGCGGGGAACA |
| | Cas12 Variant crRNA targeting | 1424 | UAAUUUCUACUAAGUGUAGAUCAAGCUA |
| | Cryptococcus neoformans | | UGCAUCCAUGCAU |
| | Cas12 Variant crRNA targeting | 1425 | UAAUUUCUACUAAGUGUAGAUGUUCGCU |
| | Cryptococcus neoformans | | CUAUCGAAGGGUG |
| | Cas12 Variant crRNA targeting | 1426 | UAAUUUCUACUAAGUGUAGAUUACAAG |
| | Cryptococcus neoformans | | UCGCAUUUCGGAGC |
| | Cas12 Variant crRNA targeting | 1427 | UAAUUUCUACUAAGUGUAGAUUCGGUAC |
| | Corynebacterium | | GAGAUGAGCCCGC |
| | pseudotuberculosis chrA | | |
| | Cas12 Variant crRNA targeting | 1428 | UAAUUUCUACUAAGUGUAGAUAUGUGA |
| | Corynebacterium | | GUCGCCGCGACCGA |
| | pseudotuberculosis chrA | | |
| | Cas12 Variant crRNA targeting | 1429 | UAAUUUCUACUAAGUGUAGAUACGACUU |
| | Corynebacterium | | UCGUGCCGUAGCU |
| | pseudotuberculosis chrA | | |
| | Cas12 Variant crRNA targeting | 1310 | UAAUUUCUACUAAGUGUAGAUACGGGG |
| | Escherichia coli 16S | | GCCGCACAAGCGGU |
| | Cas12 Variant crRNA targeting | 1430 | UAAUUUCUACUAAGUGUAGAUAGUCUCG |
| | Escherichia coli 16S | | UAGAGGGGGGUAG |
| | Cas12 Variant crRNA targeting | 1431 | UAAUUUCUACUAAGUGUAGAUGCUGCUU |
| | Escherichia coli 16S | | UGCUGACGAGUGG |
| | Cas12 Variant crRNA targeting | 1432 | UAAUUUCUACUAAGUGUAGAUAGGCUUC |
| | Klebsiella variicola | | GGGUCGGGCCGAG |
| | Cas12 Variant crRNA targeting | 1433 | UAAUUUCUACUAAGUGUAGAUGCUCCGG |
| | Klebsiella variicola | | CCAGCAAAAUCGC |
| | Cas12 Variant crRNA targeting | 1434 | UAAUUUCUACUAAGUGUAGAUGUCGGGC |
| | Klebsiella variicola | | CGAGGCAGCGUCC |
| | Cas12 Variant crRNA targeting | 1435 | UAAUUUCUACUAAGUGUAGAUAACCUUC |
| | Vibrio parahaemolyticus 23S | | GGGGAACGAUAAC |
| | Cas12 Variant crRNA targeting | 1436 | UAAUUUCUACUAAGUGUAGAUCUCGCGU |
| | Vibrio parahaemolyticus 23S | | CAGGAUAUGCCUA |
| | Cas12 Variant crRNA targeting | 1378 | UAAUUUCUACUAAGUGUAGAUAUAGCG |
| | Vibrio parahaemolyticus 23S | | UAUUCGUUUGACGU |

### Reporter

[0403] Reporters, which can be referred to interchangeably reporters, or detector nucleic acids, described herein are compatible for use in the devices described herein (e.g., pneumatic valve devices, sliding valve devices, rotating valve devices, and lateral flow devices) and may be used in conjunction with compositions disclosed herein (e.g., programmable nucleases, guide nucleic acids, reagents for in vitro transcription, reagents for amplification, reagents for reverse transcription, reporters, or any combination thereof) to carry out highly efficient, rapid, and accurate reactions for detecting whether a target nucleic acid is present in a sample (e.g., DETECTR reactions). Described herein is a reporter comprising a single stranded detector nucleic acid comprising a detection moiety, wherein the reporter is capable of being cleaved by the activated programmable nuclease, thereby generating a first detectable signal. As used herein, a detector nucleic acid is used interchangeably with reporter or reporter. In some cases, the detector nucleic acid is a single-stranded nucleic acid comprising deoxyribonucleotides. In other cases, the detector nucleic acid is a single-stranded nucleic acid comprising ribonucleotides. The detector nucleic acid can be a single-stranded nucleic acid comprising at least one deoxyribonucleotide and at least one ribonucleotide. In some cases, the detector nucleic acid is a single-stranded nucleic acid comprising at least one ribonucleotide residue at an internal position that functions as a cleavage site. In some cases, the detector nucleic acid may comprise at least 2, 3, 4, 5, 6, 7, 8, 9, or 10 ribonucleotide residues at an internal position. In some cases, the detector nucleic acid may comprise from 2 to 10, from 3 to 9, from 4 to 8, or from 5 to 7 ribonucleotide residues at an internal position. In some cases, the detector nucleic acid may comprise from 3 to 10, from 4 to 10, from 5 to 10, from 6 to 10, from 7 to 10, from 8 to 10, from 9 to 10, from 2 to 8, from 3 to 8, from 5 to 8, from 6 to 8, from 7 to 8, from 2 to 5, from 3 to 5, or from 4 to 5 ribonucleotide residues at an internal position. Sometimes the ribonucleotide residues are continuous. Alternatively, the ribonucleotide residues are interspersed in between non-ribonucleotide residues. In some cases, the detector nucleic acid has only ribonucleotide residues. In some cases, the detector nucleic acid has only deoxyribonucleotide residues. In some cases, the detector nucleic acid may comprise nucleotides resistant to cleavage by the programmable nuclease described herein. In some cases, the detector nucleic acid may comprise synthetic nucleotides. In some cases, the detector nucleic acid may comprise at least one ribonucleotide residue and at least one non-ribonucleotide residue. In some cases, the detector nucleic acid is 5-20, 5-15, 5-10, 7-20, 7-15, or 7-10 nucleotides in length. In some cases, the detector nucleic acid is from 3 to 20, from 4 to 20, from 5 to 20, from 6 to 20, from 7 to 20, from 8 to 20, from 9 to 20, from 10 to 20, from 15 to 20, from 3 to 15, from 4 to 15, from 5 to 15, from 6 to 15, from 7 to 15, from 8 to 15, from 9 to 15, from 10 to 15, from 3 to 10, from 4 to 10, from 5 to 10, from 6 to 10, from 7 to 10, from 8 to 10, from 9 to 10, from 3 to 8, from 4 to 8, from 5 to 8, from 6 to 8, or from 7 to 8 nucleotides in length. In some cases, the detector nucleic acid may comprise at least one uracil ribonucleotide. In some cases, the detector nucleic acid may comprise at least two uracil ribonucleotides. Sometimes the detector nucleic acid has only uracil ribonucleotides. In some cases, the detector nucleic acid may comprise at least one adenine ribonucleotide. In some cases, the detector nucleic acid may comprise at least two adenine ribonucleotide. In some cases, the detector nucleic acid has only adenine ribonucleotides. In some cases, the detector nucleic acid may comprise at least one cytosine ribonucleotide. In some cases, the detector nucleic acid may comprise at least two cytosine ribonucleotide. In some cases, the detector nucleic acid may comprise at least one guanine ribonucleotide. In some cases, the detector nucleic acid may comprise at least two guanine ribonucleotide. A detector nucleic acid can comprise only unmodified ribonucleotides, only unmodified deoxyribonucleotides, or a combination thereof. In some cases, the detector nucleic acid is from 5 to 12 nucleotides in length. In some cases, the detector nucleic acid is at least 2, 3, 4, 5, 6, 7, 8, 9, 10, 11, 12, 13, 14, 15, 16, 17, 18, 19, 20, 21, 22, 23, 24, 25, 26, 27, 28, 29, or 30 nucleotides in length. In some cases, the detector nucleic acid is 2, 3, 4, 5, 6, 7, 8, 9, 10, 11, 12, 13, 14, 15, 16, 17, 18, 19, 20, 21, 22, 23, 24, 25, 26, 27, 28, 29, or 30 nucleotides in length. For cleavage by a programmable nuclease comprising Cas13, a detector nucleic acid can be 5, 8, or 10 nucleotides in length. For cleavage by a programmable nuclease comprising Cas12, a detector nucleic acid can be 10 nucleotides in length.

### Signals

[0404] The devices, systems, fluidic devices, kits, and methods for detecting the presence of a target nucleic acid in a sample described herein may comprise a generation of a signal indicative of the presence or absence of the target nucleic acid in the sample. The generation of a signal indicative of the presence or absence of the target nucleic acid in the sample as described herein is compatible with the methods and devices described herein (e.g., pneumatic valve devices, sliding valve devices, rotating valve devices, and lateral flow devices) and may result from the use of compositions disclosed herein (e.g., programmable nucleases, guide nucleic acids, reagents for in vitro transcription, reagents for amplification, reagents for reverse transcription, reporters, or any combination thereof) to carry out highly efficient, rapid, and accurate reactions for detecting whether a target nucleic acid is present in a sample (e.g., DETECTR reactions). As disclosed herein, in some embodiments, detecting the presence or absence of a target nucleic acid of interest involves measuring a signal emitted from a detection moiety present in a reporter, after cleavage of the reporter by an activated programmable nuclease. Alternatively, or in combination, in some embodiments, detecting the presence or absence of a target nucleic acid of interest involves measuring a signal emitted from a conjugate bound to a detection moiety present in a reporter, after cleavage of the reporter by an activated programmable nuclease. The conjugates may comprise a nanoparticle, a gold nanoparticle, a latex nanoparticle, a quantum dot, a chemiluminescent nanoparticle, a carbon nanoparticle, a selenium nanoparticle, a fluorescent nanoparticle, a liposome, or a dendrimer. The surface of the conjugate may be coated by a conjugate binding molecule that binds to the detection moiety or another affinity molecule of the cleaved detector molecule as described herein. Thus, the detecting steps disclosed herein involve indirectly (e.g., via a reporter) measuring the presence of a target nucleic acid, quantifying how much of the target nucleic acid is present, or, measuring a signal indicating that the target nucleic acid is absent in a sample. In some embodiments, a signal is generated upon cleavage of the detector nucleic acid by the programmable nuclease. In other embodiments, the signal changes upon cleavage of the detector nucleic acid by the programmable nuclease. In other embodiments, a signal may be present in the absence of detector nucleic acid cleavage and disappear upon cleavage of the target nucleic acid by the programmable nuclease. For example, a signal may be produced in a microfluidic device or lateral flow device after contacting a sample with a composition comprising a programmable nuclease.

### Buffers

[0405] The reagents described herein can also include buffers, which are compatible with the devices, systems, fluidic devices, kits, and methods disclosed herein. The buffers described herein are compatible for use in the devices described herein (e.g., pneumatic valve devices, sliding valve devices, rotating valve devices, and lateral flow devices) and may be used in conjunction with compositions disclosed herein (e.g., programmable nucleases, guide nucleic acids, reagents for in vitro transcription, reagents for amplification, reagents for reverse transcription, reporters, or any combination thereof) to carry out highly efficient, rapid, and accurate reactions for detecting whether the target nucleic acid is in the sample (e.g., DETECTR reactions). These buffers are compatible with the other reagents, samples, and support mediums as described herein for detection of an ailment, such as a disease, cancer, or genetic disorder, or genetic information, such as for phenotyping, genotyping, or determining ancestry. The methods described herein can also include the use of buffers, which are compatible with the methods disclosed herein. For example, a buffer may comprise HEPES, MES, TCEP, EGTA, Tween 20, KCl, MgCl², glycerol, or any combination thereof. In some instances, a buffer may comprise Tris-HCl pH 8.8, VLB, EGTA, CH3COOH, TCEP, IsoAmp®, (NH4)2SO4, KCl, MgSO4, Tween20, KOAc, MgOAc, BSA, TCEP, or any combination thereof. In some instances the buffer may comprise from 0 to 100, 0 to 75, 0 to 50, 0 to 25, 0 to 20, 0 to 10, 0 to 5, 5 to 10, 5 to 15, 5 to 20, 5 to 25, to 30, 5 to 40, 5 to 50, 5 to 75, 5 to 100, 10 to 20, 10 to 30, 10 to 40, 10 to 50, 15 to 20, 15 to 25, 15 to 30, 15 to 4, 15 to 50, 20 to 25, 20 to 30, 20 to 40, or 20 to 50 mM HEPES pH 6.8. The buffer can comprise to 0 to 500, 0 to 400, 0 to 300, 0 to 250, 0 to 200, 0 to 150, 0 to 100, 0 to 75, 0 to 50, 0 to 25, 0 to 20, 0 to 10, 0 to 5, 5 to 10, 5 to 15, 5 to 20, 5 to 25, to 30, 5 to 40, 5 to 50, 5 to 75, 5 to 100, 5 to 150, 5 to 200, 5 to 250, 5 to 300, 5 to 400, 5 to 500, 25 to 50, 25 to 75, 25 to 100, 50 to 100, 50 150, 50 to 200, 50 to 250, 50 to 300, 100 to 200, 100 to 250, 100 to 300, or 150 to 250 mM KCl. In other instances the buffer may comprise 0 to 100, 0 to 75, 0 to 50, 0 to 25, 0 to 20, 0 to 10, 0 to 5, 5 to 10, 5 to 15, 5 to 20, 5 to 25, to 30, 5 to 40, 5 to 50, 5 to 75, 5 to 100, 10 to 20, 10 to 30, 10 to 40, 10 to 50, 15 to 20, 15 to 25, 15 to 30, 15 to 4, 15 to 50, 20 to 25, 20 to 30, 20 to 40, or 20 to 50 mM MgCl². The buffer can comprise 0 to 25, 0 to 20, 0 to 10, 0 to 5, 5 to 10, 5 to 15, 5 to 20, 5 to 25, 5 to 30% glycerol. The buffer can comprise from 0% to 30%, from 5% to 30%, from 10% to 30%, from 15% to 30%, from 20% to 30%, from 25% to 30%, from 0% to 25%, from 2% to 25%, from 5% to 25%, from 10% to 25%, from 15% to 25%, from 20% to 25%, from 0% to 20%, from 5% to 20%, from 10% to 20%, from 15% to 20%, from 0% to 15%, from 5% to 15%, from 10% to 15%, from 0% to 10%, from 5% to 10%, or from 0% to 5% glycerol. The buffer can comprise to 0 to 500, 0 to 400, 0 to 300, 0 to 250, 0 to 200, 0 to 150, 0 to 100, 0 to 75, 0 to 50, 0 to 25, 0 to 20, 0 to 10, 0 to 5, 5 to 10, 5 to 15, 5 to 20, 5 to 25, to 30, 5 to 40, 5 to 50, 5 to 75, 5 to 100, 5 to 150, 5 to 200, 5 to 250, 5 to 300, 5 to 400, 5 to 500, 25 to 50, 25 to 75, 25 to 100, 50 to 100, 50 150, 50 to 200, 50 to 250, 50 to 300, 100 to 200, 100 to 250, 100 to 300, or 150 to 250 mM Tris-HCl pH 8.8. The buffer can comprise to 0 to 500, 0 to 400, 0 to 300, 0 to 250, 0 to 200, 0 to 150, 0 to 100, 0 to 75, 0 to 50, 0 to 25, 0 to 20, 0 to 10, 0 to 5, 5 to 10, 5 to 15, 5 to 20, 5 to 25, to 30, 5 to 40, 5 to 50, 5 to 75, 5 to 100, 5 to 150, 5 to 200, 5 to 250, 5 to 300, 5 to 400, 5 to 500, 25 to 50, 25 to 75, 25 to 100, 50 to 100, 50 150, 50 to 200, 50 to 250, 50 to 300, 100 to 200, 100 to 250, 100 to 300, or 150 to 250 mM KOAc. The buffer can comprise to 0 to 500, 0 to 400, 0 to 300, 0 to 250, 0 to 200, 0 to 150, 0 to 100, 0 to 75, 0 to 50, 0 to 25, 0 to 20, 0 to 10, 0 to 5, 5 to 10, 5 to 15, 5 to 20, 5 to 25, to 30, 5 to 40, 5 to 50, 5 to 75, 5 to 100, 5 to 150, 5 to 200, 5 to 250, 5 to 300, 5 to 400, 5 to 500, 25 to 50, 25 to 75, 25 to 100, 50 to 100, 50 150, 50 to 200, 50 to 250, 50 to 300, 100 to 200, 100 to 250, 100 to 300, or 150 to 250 mM MgOAc. In some instances the buffer may comprise from 0 to 100, 0 to 75, 0 to 50, 0 to 25, 0 to 20, 0 to 10, 0 to 5, 5 to 10, 5 to 15, 5 to 20, 5 to 25, to 30, 5 to 40, 5 to 50, 5 to 75, 5 to 100, 10 to 20, 10 to 30, 10 to 40, 10 to 50, 15 to 20, 15 to 25, 15 to 30, 15 to 4, 15 to 50, 20 to 25, 20 to 30, 20 to 40, or 20 to 50 mM EGTA. The buffer can comprise from 0% to 30%, from 5% to 30%, from 10% to 30%, from 15% to 30%, from 20% to 30%, from 25% to 30%, from 0% to 25%, from 2% to 25%, from 5% to 25%, from 10% to 25%, from 15% to 25%, from 20% to 25%, from 0% to 20%, from 5% to 20%, from 10% to 20%, from 15% to 20%, from 0% to 15%, from 5% to 15%, from 10% to 15%, from 0% to 10%, from 5% to 10%, or from 0% to 5% Tween 20.

### Compositions Comprising One or More Additives for Improving Assay Signals

[0406] In some embodiments, the reagents described herein may include a composition for improving detection signal strength, detection reaction time, detection reaction efficiency, stability, solubility, or the like. In some embodiments, the composition may comprise one or more additives. The one or more additives may, for example, comprise amino acids or derivatives thereof, chaotrpes, chelators, cyclodextrins, inhibitors, ionic liquids, linkers, metals, non detergent sulfobetaines, organic acids, osmolytes, peptides, polyamides, polymers, polyols, polyols and salts, salts, or combinations thereof. In some embodiments, the one or more additives may, for example, comprise one or more of trichloroacetic acid, L-Arginine, L-Glutamic acid, glycine, L-Proline, L-Histidine, beta (B)-Alanine, L-Serine, L-Arginine ethyl ester dihydrochloride, L-Argininamide dihydrochloride, 6-Aminohexanoic acid, Gly-gly peptide, Gly-gly-gly peptide, tryptone, betaine monohydrate, D-(+)-Trehalose dihydrate, Xylitol, D-Sorbitol, sucrose, hydroxyectoine, Trimethylamine N-oxide dihydrate, methyl alpha (α)-D-gluocopyranoside, triethylene glycol, spermine tetrahydrochloride, spermidine, 5-aminovaleric acid, glutaric acid, adipic acid, ethylenediamine dihydrochloride, guanidine hydrochloride, urea, N-methylurea, N-ethylurea, N-methylformamide, hypotauring, TCEP hydrochloride, GSH (L-Glutathione reduced), GSSG (L-Glutathione oxidized), benzaminidine hydrochloride, ethylenediaminetetraacetic acid disodium salt dihydrate, magnesium chloride hexahydrate, calcium chloride dihydrate, cadmium chloride hydrate, cobalt (II) chloride hexahydrate, Non Detergent Sulfobetaine 195 (NDSB-195), NDSB-201, NDSB-211, NDSB-221, NDSB-256, taurine, acetamide, oxalic acid dihydrate, sodium malonate pH 7.0, succinic acid pH 7.0, tacsimate pH 7.0, tetraethylammonium bromide, cholin acetate, 1-Ethyl-3-methylimidazolium acetate, 1-Butyl-3-methylimidazolium chloride, ethylammonium nitrate, ammonium sulfate, ammonium chloride, magnesium sulfate hydrate, potassium thiocynate, gadolinium (III) chloride hexahydrate, cesium chloride, 4-aminobutyric acid (GABA), lithium nitrate, DL-malic acid pH 7.0, lithium citrate tribasic tetrahydrate, ammonium acetate, sodium benzenesulfonate, sodium p-toluenesulfonate, sodium chloride, potassium chloride, sodium phosphate monobasic monohydrate, potassium phosphate dibasic, sodium sulfate decahydrate, lithium chloride, sodium bromide, glycerol, ethylene glycol, polyethylene glycol 200 (PEG-200), PEG 3350, PEG 8000, PEG monomethyl ether 550, PEG monomethyl ether 750, PEG monomethyl ether 1900, formamide, polypropylene glycol P 400, pentaerythritol ethoxylate, 1,2-Propanediol, polyvinylpyrrolidone K 15, 6-O-α-Maltosyl-β-cyclodextrin, (2-Hydroxypropyl)-β-cyclodextrin, α-cyclodextrin, β-cyclodextrin, Methyl-β-cyclodextrin, or any combination thereof.

[0407] In some embodiments, the reagents described herein may include a composition for increasing the signal strength of any of the assays described herein. In some embodiments, the composition comprises water and an additive. In some embodiments, the additive may comprise trehalose, xylitol, D-sorbitol, sucrose, and trimethylamine N-oxide dihydrate, or any combination thereof. In some embodiments, the composition further comprises one or more targets, one or more enzymes, one or more reporters, one or more substrates, or any combination thereof as described herein.

[0408] In some embodiments, the reagents described herein may include a composition for reducing the time it takes for the signal of any of the assays described herein to saturate. In some embodiments, the composition comprises an additive. In some embodiments, the additive may comprise betaine monohydrate, acetamide, GABA, L-proline, beta-alanine, 6-aminohexanonic acid, urea, methylurea, ethylurea, hypotaurine, NDSB-256, ammonium acetate, or any combination thereof. In some embodiments, the composition further comprises one or more targets, one or more enzymes, one or more reporters, one or more substrates, or any combination thereof as described herein.

[0409] In some embodiments, the additive is present at a concentration of at least about 1 nM, at least about 2 nM, at least about 3 nM, at least about 4 nM, at least about 5 nM, at least about 6 nM, at least about 7 nM, at least about 8 nM, at least about 9 nM, at least about 10 nM, at least about 20 nM, at least about 30 nM, at least about 40 nM, at least about 50 nM, at least about 60 nM, at least about 70 nM, at least about 80 nM, at least about 90 nM, at least about 100 nM, at least about 200 nM, at least about 300 nM, at least about 400 nM, at least about 500 nM, at least about 600 nM, at least about 700 nM, at least about 800 nM, at least about 900 nM, at least about 1 μM, at least about 2 μM, at least about 3 μM, at least about 4 μM, at least about 5 μM, at least about 6 μM, at least about 7 μM, at least about 8 μM, at least about 9 μM, at least about 10 μM, at least about 20 μM, at least about 30 μM, at least about 40 μM, at least about 50 μM, at least about 60 μM, at least about 70 μM, at least about 80 μM, at least about 90 μM, at least about 100 μM, at least about 200 μM, at least about 300 μM, at least about 400 μM, at least about 500 μM, at least about 600 μM, at least about 700 μM, at least about 800 μM, at least about 900 μM, at least about 1 mM, at least about 2 mM, at least about 3 mM, at least about 4 mM, at least about 5 mM, at least about 6 mM, at least about 7 mM, at least about 8 mM, at least about 9 mM, at least about 10 mM, at least about 20 mM, at least about 30 mM, at least about 40 mM, at least about 50 mM, at least about 60 mM, at least about 70 mM, at least about 80 mM, at least about 90 mM, at least about 100 mM, at least about 200 mM, at least about 300 mM, at least about 400 mM, at least about 500 mM, at least about 600 mM, at least about 700 mM, at least about 800 mM, at least about 900 mM, at least about 1 M, at least about 2 M, at least about 3 M, at least about 4 M, at least about 5 M, at least about 6 M, at least about 7 M, at least about 8 M, at least about 9 M, or at least about 10 M.

[0410] In some embodiments, the composition increases the signal strength by at least about a factor of 1.01, at least about a factor of 1.02, at least about a factor of 1.03, at least about a factor of 1.04, at least about a factor of 1.05, at least about a factor of 1.06, at least about a factor of 1.07, at least about a factor of 1.08, at least about a factor of 1.09, at least about a factor of 1.1, at least about a factor of 1.2, at least about a factor of 1.3, at least about a factor of 1.4, at least about a factor of 1.5, at least about a factor of 1.6, at least about a factor of 1.7, at least about a factor of 1.8, at least about a factor of 1.9, at least about a factor of 2, at least about a factor of 3, at least about a factor of 4, at least about a factor of 5, at least about a factor of 6, at least about a factor of 7, at least about a factor of 8, at least about a factor of 9, at least about a factor of 10, at least about a factor of 20, at least about a factor of 30, at least about a factor of 40, at least about a factor of 50, at least about a factor of 60, at least about a factor of 70, at least about a factor of 80, at least about a factor of 90, at least about a factor of 100, at least about a factor of 200, at least about a factor of 300, at least about a factor of 400, at least about a factor of 500, at least about a factor of 600, at least about a factor of 700, at least about a factor of 800, at least about a factor of 900, or at least about a factor of 1000.

[0411] In some embodiments, the composition reduces the time it takes for the signal to saturate by at least about a factor of 1.01, at least about a factor of 1.02, at least about a factor of 1.03, at least about a factor of 1.04, at least about a factor of 1.05, at least about a factor of 1.06, at least about a factor of 1.07, at least about a factor of 1.08, at least about a factor of 1.09, at least about a factor of 1.1, at least about a factor of 1.2, at least about a factor of 1.3, at least about a factor of 1.4, at least about a factor of 1.5, at least about a factor of 1.6, at least about a factor of 1.7, at least about a factor of 1.8, at least about a factor of 1.9, at least about a factor of 2, at least about a factor of 3, at least about a factor of 4, at least about a factor of 5, at least about a factor of 6, at least about a factor of 7, at least about a factor of 8, at least about a factor of 9, at least about a factor of 10, at least about a factor of 20, at least about a factor of 30, at least about a factor of 40, at least about a factor of 50, at least about a factor of 60, at least about a factor of 70, at least about a factor of 80, at least about a factor of 90, at least about a factor of 100, at least about a factor of 200, at least about a factor of 300, at least about a factor of 400, at least about a factor of 500, at least about a factor of 600, at least about a factor of 700, at least about a factor of 800, at least about a factor of 900, or at least about a factor of 1000. In some embodiments, the additive is present at a concentration of at least about 1 nM, at least about 2 nM, at least about 3 nM, at least about 4 nM, at least about 5 nM, at least about 6 nM, at least about 7 nM, at least about 8 nM, at least about 9 nM, at least about 10 nM, at least about 20 nM, at least about 30 nM, at least about 40 nM, at least about 50 nM, at least about 60 nM, at least about 70 nM, at least about 80 nM, at least about 90 nM, at least about 100 nM, at least about 200 nM, at least about 300 nM, at least about 400 nM, at least about 500 nM, at least about 600 nM, at least about 700 nM, at least about 800 nM, at least about 900 nM, at least about 1 μM, at least about 2 μM, at least about 3 μM, at least about 4 μM, at least about 5 μM, at least about 6 μM, at least about 7 μM, at least about 8 μM, at least about 9 μM, at least about 10 μM, at least about 20 μM, at least about 30 μM, at least about 40 μM, at least about 50 μM, at least about 60 M, at least about 70 μM, at least about 80 μM, at least about 90 μM, at least about 100 μM, at least about 200 μM, at least about 300 μM, at least about 400 μM, at least about 500 μM, at least about 600 μM, at least about 700 μM, at least about 800 μM, at least about 900 μM, at least about 1 mM, at least about 2 mM, at least about 3 mM, at least about 4 mM, at least about 5 mM, at least about 6 mM, at least about 7 mM, at least about 8 mM, at least about 9 mM, at least about 10 mM, at least about 20 mM, at least about 30 mM, at least about 40 mM, at least about 50 mM, at least about 60 mM, at least about 70 mM, at least about 80 mM, at least about 90 mM, at least about 100 mM, at least about 200 mM, at least about 300 mM, at least about 400 mM, at least about 500 mM, at least about 600 mM, at least about 700 mM, at least about 800 mM, at least about 900 mM, at least about 1 M, at least about 2 M, at least about 3 M, at least about 4 M, at least about 5 M, at least about 6 M, at least about 7 M, at least about 8 M, at least about 9 M, at least about 10 M.

[0412] In some embodiments, the one or more enzymes may comprise a nuclease. In some embodiments, the one or more enzymes may comprise a programmable nuclease. In some embodiments, the one or more enzymes may comprise a Cas12 enzyme. In some embodiments, the one or more enzymes may comprise a Cas14 enzyme. In some embodiments, the one or more enzymes may comprise a CasPhi enzyme. In some embodiments, the one or more enzymes may comprise a Cas13 enzyme. In some embodiments, the one or more enzymes may comprise HRP. In some embodiments, the one or more enzymes may comprise any one or combination of enzymes presented in this disclosure.

[0413] In some embodiments, the one or more reporters may comprise a reporter free in solution. In some embodiments, the one or more reporters may comprise a reporter immobilized on a surface of a support. In some embodiments, the one or more reporters may comprise biotin. In some embodiments, the one or more reporters may comprise a fluorescent moiety. In some embodiments, the one or more reporters may comprise a nucleic acid tether. In some embodiments, the one or more reporters may comprise a linker. In some embodiments, the one or more reporters may comprise any one or combination of reporters presented in this disclosure.

[0414] In some embodiments, the one or more supports may comprise a glassy substance. In some embodiments, the one or more substrates may comprise a polymeric substance. In some embodiments, the one or more substrates may comprise a hydrogel. In some embodiments, the one or more substrates may comprise any one or combination of substrates presented in this disclosure.

### DETECTR Device Layout

[0415] FIG. 43 shows a layout for a device cartridge configured to run a programmable nuclease assay (e.g., a DETECTR assay) as described herein. Shown at top is a pneumatic pump configured to interface with the cartridge. Shown at middle is a top view of the cartridge showing a top layer with reservoirs. Shown at bottom is a sliding valve (4301) containing the sample and arrows pointing to the lysis chamber (4302) at left, followed by amplification chambers (4303) to the right, and detection chambers (4304) further to the right. FIG. 44 shows a schematic of a sliding valve device. The offset pitch of the channels allows aspirating and dispensing into each well separately and helps to mitigate cross talk between the amplification chambers (4402) and corresponding detection chambers (4303). FIG. 45 shows a diagram of sample movement through the sliding valve (4500) device shown in FIG. 44. In the initial closed position (i.), the sample is loaded into the sample well and lysed. The sliding valve (4500) is then actuated by the instrument, and samples are loaded into each of the channels using the pipette pump, which dispenses the appropriate volume into the channel (ii.). The sample is delivered to the amplification chambers by actuating the sliding valve (4500) and mixed with the pipette pump (iii.). Samples from the amplification chamber are aspirated into each channel (iv.) and then dispensed and mixed into each DETECTR chamber (v.) by actuating the sliding valve (4500) and pipette pump. In some embodiments the sliding valve device has a surface area of 5 cm by 8 cm, 5 by 6 cm, 6 by 7 cm, 7 by 8 cm, 8 by 9 cm, 9 by 10 cm, 10 by 11 cm, 11 by 12 cm, 6 by 9 cm, 7 by 10 cm, 8 by 11 cm, 9 by 12 cm, 10 by 13 cm, 11 by 14 cm, 12 by 11 cm, about 30 sq cm, about 35 sq cm, about 40 sq cm, about 45 sq cm, about 50 sq cm, about 55 sq cm, about 60 sq cm, about 65 sq cm, about 70 sq cm, about 75 sq cm, about 25 sq cm, about 20 sq cm, about 15 sq cm, about 10 sq cm, about 5 sq cm, from 1 to 100 sq cm, from 5 to 10 sq cm, from 10 to 15 sq cm, from 15 to 20 sq cm, from 20 to 25 sq cm, from 25 to 30 sq cm, from 30 to 35 sq cm, from 35 to 40 sq cm, from 40 to 45 sq cm, from 45 to 50 sq cm, from 5 to 90 sq cm, from 10 to 0 sq cm, from 15 to 5 sq cm, from 20 to 10 sq cm, or from 25 to 15 sq cm.

[0416] In some embodiments, a sliding valve device may comprise a first chamber for sample lysis, a second chamber for detection, and a third chamber for amplification. Another way of referring to these chambers is a sample chamber (e.g., the first chamber), a detection chamber (e.g., the second chamber), and an amplification chamber (e.g., the third chamber). In this layout, the present disclosure provides a device for measuring a signal which may comprise: a sliding layer comprising a channel with an opening at a first end of the channel and an opening at a second end of the channel; and a fixed layer comprising: i) a first chamber having an opening; ii) a second chamber having an opening, wherein the second chamber may comprise a programmable nuclease and a reporter comprising a nucleic acid and a detection moiety; iii) a first side channel having an opening aligned with the opening of the first chamber; and iv) a second side channel having an opening aligned with the opening of the second chamber, wherein the sliding layer and the fixed layer move relative to each other to fluidically connect the first chamber and the first side channel via the opening at the first end of the channel, the opening at the second end of the channel, the opening of the first chamber, and the opening of the first side channel, and wherein the sliding layer and the fixed layer move relative to each other to fluidically connect the second chamber and the second side channel via the opening at the first end of the channel, the opening at the second end of the channel, the opening of the second chamber, and the opening of the second side channel. The fixed layer further may comprise i) a third chamber having an opening; and ii) a third side channel having an opening aligned with the opening of the third chamber, wherein the sliding layer and the fixed layer move relative to each other to fluidically connect the third chamber and the third side channel via the opening at the first end of the channel, the opening at the second end of the channel, the opening of the third chamber, and the opening of the third side channel. The second chamber is coupled to a measurement device for measuring the signal from the detection moiety produced by cleavage of the nucleic acid of the reporter. Additionally, the opening of the first end of the channel overlaps with the opening of the first chamber and the opening of the second end of the channel overlaps with the opening of the first side channel. The opening of the first end of the channel overlaps with the opening of the second chamber and the opening of the second end of the channel overlaps with the opening of the second side channel. The opening of the first end of the channel overlaps with the opening of the third chamber and the opening of the second end of the channel overlaps with the opening of the third channel. Additionally, the first side channel, the second side channel, and the third side channel are fluidically connected to a mixing chamber. In this embodiment, the second chamber additionally includes a guide nucleic acid.

[0417] In another embodiment, a sliding valve device may comprise a first chamber for sample lysis and a second chamber for detection. Another way of referring to these chambers is a sample chamber (e.g., the first chamber) and a detection chamber. In this layout, the present disclosure provides a device for measuring a signal may comprise: a sliding layer comprising a channel with an opening at a first end of the channel and an opening at a second end of the channel; and a fixed layer comprising: i) a first chamber having an opening; ii) a second chamber having an opening, wherein the second chamber may comprise a programmable nuclease and a reporter comprising a nucleic acid and a detection moiety; iii) a first side channel having an opening aligned with the opening of the first chamber; and iv) a second side channel having an opening aligned with the opening of the second chamber, wherein the sliding layer and the fixed layer move relative to each other to fluidically connect the first chamber and the first side channel via the opening at the first end of the channel, the opening at the second end of the channel, the opening of the first chamber, and the opening of the first side channel, and wherein the sliding layer and the fixed layer move relative to each other to fluidically connect the second chamber and the second side channel via the opening at the first end of the channel, the opening at the second end of the channel, the opening of the second chamber, and the opening of the second side channel. The second chamber is coupled to a measurement device for measuring the signal from the detection moiety produced by cleavage of the nucleic acid of the reporter. Additionally, the opening of the first end of the channel overlaps with the opening of the first chamber and the opening of the second end of the channel overlaps with the opening of the first side channel. The opening of the first end of the channel overlaps with the opening of the second chamber and the opening of the second end of the channel overlaps with the opening of the second side channel. Additionally, the first side channel and the second side channel are fluidically connected to a mixing chamber. In this embodiment, the second chamber additionally includes a guide nucleic acid.

[0418] In some embodiments, the DETECTR assay relies on fluorescence-based detection. In certain embodiments, the DETECTR assay relies on electrochemical-based detection. Electrochemical-based assays have been found to have a lower limit of detection than fluorescence-based assays by roughly two orders of magnitude (Lou et al., 2015).

[0419] In some embodiments, electrochemical probes are incorporated into the DETECTR assay to achieve a lower limit of detection. For example, the following electrochemical probe may comprise: 5′-2XXTTATTXX-3′, where 2=5′ 6-FAM; X=ferrocene dT; and 3′=3′ Biotin TEG, where TEG is a 15 atom triethylene glycol spacer. In some embodiments, electrochemical probes are tested with cyclic voltammetry. In some embodiments, electrochemical probes are tested with square wave voltammetry. In some embodiments, a DropSens μSTAT ECL instrument is used for electrochemical measurements. In some embodiments, DropSens screen-printed carbon electrodes are used for electrochemical measurements.

[0420] FIG. 13 shows a line graph depicting current as a function of potential. Potential (V) is shown on the x-axis from 0 V to 0.25 V in increments of 0.05 V. Current (μA) is shown on the y-axis from 0 μA to 0.20 μA in increments of 0.02 μA. The graph depicts two lines. The dashed line depicts an oxidation curve for 50 nM HERC2 DETECTR at time=0 of the reaction. The solid line depicts an oxidation curve for 50 nM HERC2 DETECTR at 33 minutes after initiation of the reaction. In this example, error bars represent standard deviation of two measurements of the same solution, using three traces from each measurement. The 40 nA difference in signal indicates detection of the 50 nM HERC2 DETECTR.

[0421] FIG. 14 shows a line graph depicting current as a function of potential. Potential (V) is shown on the x-axis from 0 V to 0.25 V in increments of 0.05 V. Current (μA) is shown on the y-axis from 0 μA to −0.14 μA in increments of 0.02 μA. The graph depicts two lines. The dashed line depicts a reduction curve for HERC2 DETECTR at 50 fM at time=0 for the reaction. The solid line depicts a reduction curve for HERC2 DETECTR at 50 fM at 33 minutes after initiation of the reaction. In this example, error bars represent standard deviation of two measurements of the same solution, using three traces from each measurement.

[0422] FIG. 15 shows a line graph depicting the current as a function of potential.

[0423] Potential (V) is shown on the x-axis from −0.4 V to 0.6 V in increments of 0.2 V. Current (μA) is shown on the y-axis from −1 μA to 1 μA in increments of 0.2 μA. The dark green line (1501) and light green line (1502) depict cyclic voltammograms taken before and after HERC2 DETECTR reaction using 24 μM electrochemical reporter, respectively. In this example, each trace is the average of three scans of the same solution and error bars represent standard deviations. The difference in current between the voltammograms indicates detection of HERC2 DETECTR at 24 μM.

### SARS-CoV-2 Electrochemical DETECTR Reaction

[0424] In certain embodiments, described herein DETECTR has been demonstrated to be a powerful technology for detection of pathogens such as SARS-CoV-2 (Broughton et al., 2020). In some embodiments, electrochemical probes are utilized in the DETECTR assay for detection of pathogens. In some embodiments, the electrochemical probe-based DETECTR assay is configured for detection of the pathogen SARS-CoV-2. In some embodiments, the electrochemical probe is 5′-2XXTTATTXX-3′, where 2=5′ 6-FAM; X=ferrocene dT; and 3=3′ BiotinTEG.

[0425] FIG. 16 shows an example line graph depicting current as a function of potential. Potential (V) is shown on the x-axis from −0.3 V to 0.5 V in increments of 0.1 V. Current (A) is shown on the y-axis from −0.04 μA to 0.05 μA in increments of 0.01 μA. The green line (1601) depicts an oxidation curve for SARS-CoV2 at 0 seconds into the reaction and the yellow line (1602) depicts an oxidation curve for SARS-CoV2 at 20 minutes after initiation of the reaction. In some embodiments, error bars represent standard deviation of three traces from each measurement. The oxidation curve at 20 minutes is observed to be 20 nA higher than the oxidation curve at time 0. The 20 nA difference indicates the presence of SARS-CoV2.

[0426] FIG. 17 shows an example line graph depicting current as a function of potential. Potential (V) is shown on the x-axis from −0.3 V to 0.5 V in increments of 0.1 V. Current (μA) is shown on the y-axis from −0.6 μA to 0.6 μA in increments of 0.2 μA. The lines depict square wave voltammetry measurements for SARS-CoV-2 DETECTR reaction with electrochemical reporters and controls.

[0427] FIG. 18 shows an example of a complexing master mix with R1763 (N-gene).

[0428] FIG. 19 presents an example of experimental conditions described herein, for square wave voltammetry.

### DETECTR Assay Immobilization

[0429] CRISPR diagnostic reactions are generally performed in solution where the Cas protein-RNA complexes can freely bind target nucleic acids and reporters. However, reactions where all components are in solution limit the designs of CRISPR diagnostic assays, especially in microfluidic devices. A system where various components of the CRISPR diagnostic reaction are immobilized on a surface enables designs where multiple readouts can be accomplished within a single reaction chamber.

[0430] Described herein are various methods to immobilize CRISPR diagnostic reaction components to the surface of a reaction chamber or other surface (e.g., a surface of a bead). Any of the devices described herein may comprise one or more immobilized detection reagent components (e.g., programmable nuclease, guide nucleic acid, and/or reporter), or component capable of being immobilized at some point during a particular assay (e.g., through the inclusion of a functionality for immobilization to a surface, such as the surface of a bead). In some embodiments, the surface is a bead, which may be present at the beginning of a reaction, or added later to capture one or more components of a reaction (e.g., unreacted reporters comprising an enzyme, a linker, and a functionality for immobilization). The term “bead” is not limited to any particular size or shape. Beads may be uniform or non-uniform, spherical or non-spherical, regular or irregular. In embodiments, beads are magnetic or paramagnetic. The surface of the beads may comprise a reaction partner for the functional moiety for immobilization (e.g., streptavidin coated beads for capture of targets comprising a biotin functionality). In some embodiments, the beads are microparticles or nanoparticles. A variety of beads for use with nucleic acid based assays are commercially available, a non-limiting example of which includes DYNABEADS in various formats. In certain instances, methods include immobilization of programmable nucleases (e.g., Cas proteins or Cas enzymes), reporters, guide nucleic acids (e.g., gRNAs), or a combination of two or all of these. In some embodiments, various CRISPR diagnostic reaction components are modified with biotin. In some embodiments, these biotinylated CRISPR diagnostic reaction components are tested for immobilization on surfaces coated with streptavidin. In some embodiments, the biotin-streptavidin interaction is used as a model system for other immobilization chemistries.

[0431] Table 3 presents gRNA and reporter immobilization sequences

TABLE 3
gRNA and reporter immobilization sequences

| | SEQ | | |
|---|---|---|---|
| | ID | | |
| Name | NO: | Sequence | Description |
| R003 | 1437 | rGrGrCrCrArCrCrCrCrArArArArArUrGrArAr | unmodified Cas13 crRNA |
| | | GrGrGrGrArCrUrArArArArCrArGrUrGrArUr | |
| | | ArArGrUrGrGrArArUrGrCrCrArUrG | |
| mod023 | 1438 | /5BiotinTEG/rGrGrCrCrArCrCrCrCrArArArAr | biotin modified Cas13 crRNA |
| | | ArUrGrArArGrGrGrGrArCrUrArArArArCrAr | |
| | | CrGrArCrCrUrArCrUrCrUrCrCrCrArUrArCrU | |
| | | rC | |
| R1763 | 1439 | rUrArArUrUrUrCrUrArCrUrArArGrUrGrUrAr | Unmodified gRNA targeting a |
| | | GrArUrCrCrCrCrCrArGrCrGrCrUrUrCrArGrC | sequence in SARS-CoV-2 |
| | | rGrUrUrC | |
| mod011 | 1440 | /5Biosg/rUrA rArUrU rUrCrU rArCrUrArArG | R1763 with a 5′ biotin |
| | | rUrGrU rArGrArUrCrCrCrCrCrArGrCrGrCrU | |
| | | rUrCrA rGrCrG rUrUrC | |
| mod012 | 1441 | /5Biosg/T*T*T*T*T*rUrArArUrUrUrCrUrAr | R1763 with 5 |
| | | CrUrArArGrUrGrUrArGrArUrCrCrCrCrCrAr | phosphorothioated nucleotides |
| | | GrCrGrCrUrUrCrArGrCrGrUrUrC | on 5′ end |
| mod013 | 1442 | /5Biosg/T*T*T*T*T*T*T*T*T*T*rUrArArUr | R1763 with 10 |
| | | UrUrCrUrArCrUrArArGrUrGrUrArGrArUrCr | phosphorothioated nucleotides |
| | | CrCrCrCrArGrCrGrCrUrUrCrArGrCrGrUrUrC | on 5′ end |
| mod014 | 1443 | rUrArArUrUrUrCrUrA/iBiodUK/rCrUrArArGr | R1763 with an internal biotin |
| | | UrGrUrArGrArUrCrCrCrCrCrArGrCrGrCrUr | modification |
| | | UrCrArGrCrGrUrUrC | |
| mod015 | 1444 | rUrArArUrUrUrCrUrArCrUrArArGrUrGrUrAr | R1763 with an internal biotin |
| | | GrArUrC/iBiodUK/rCrCrCrCrArGrCrGrCrUr | modification |
| | | UrCrArGrCrGrUrUrC | |
| mod016 | 1445 | rUrArArUrUrUrC/iBiodUK/rArCrUrArArGrUr | R1763 with an internal biotin |
| | | GrUrArGrArUrCrCrCrCrCrArGrCrGrCrUrUr | modification |
| | | CrArGrCrGrUrUrC | |
| mod017 | 1446 | rUrArArUrUrUrCrUrArCrUrArArGrUrGrUrAr | R1763 with an internal biotin |
| | | GrA/iBiodUK/rCrCrCrCrCrArGrCrGrCrUrUr | modification |
| | | CrArGrCrGrUrUrC | |
| mod018 | 1447 | /5BiotinTEG/rUrArArUrUrUrCrUrArCrUrArA | R1763 with a 5′ biotin-TEG |
| | | rGrUrGrUrArGrArUrCrCrCrCrCrArGrCrGrCr | modification |
| | | UrUrCrArGrCrGrUrUrC | |
| mod019 | 1448 | rUrA rArUrU rUrCrU rArCrU rArArGrUrGrU | R1763 with a 3′ biotin |
| | | rArGrA rUrCrC rCrCrC rArGrCrGrCrU | modification |
| | | rUrCrA rGrCrG rUrUrC/3Bio/ | |
| mod020 | 1449 | rUrA rArUrU rUrCrU rArCrU rArArGrUrGrU | R1763 with a 3′ biotin-TEG |
| | | rArGrA rUrCrC rCrCrCrArGrCrGrCrU | modification |
| | | rUrCrA rGrCrGrUrUrC/3BioTEG/ | |
| rep072 | | /56-FAM/TTATTATT/3Bio/ | FAM reporter with 3′ biotin |
| rep103 | | /5Alex488N/TT ATT ATT/3Bio/ | 5′ modified with Alexa488 |
| | | | reporter and 3′ modified with |
| | | | biotin |
| rep104 | 1452 | /5Alex488N/TT ATT ATT | 5′ modified with Alexa488 |
| | | AT/iBiodT/ATT/3IABKFQ/ | reporter with internal biotin |
| | | | and 3′ modified with a |
| | | | quencher |
| rep105 | 1453 | /5BiotinTEG/*T*T*/i6-FAMK/*TATTA TTA | 5′ modified with biotin-TEG |
| | | TTA TTA TT/3IABKFQ/ | followed by two |
| | | | phosphorothioated nucleotides |
| | | | (*) should not be cleavable and |
| | | | an internal FAM and 3′ |
| | | | modified with a quencher |
| | | | *T* could also be some other |
| | | | non-cleavable su |
| rep106 | 1454 | /56-FAM/TT ATT ATT ATT A/3Dig_N/ | 5′ FAM reporter with a 3′ DIG |
| rep115 | 1455 | [biotinTEG]TTTTTTTTTTTTTTTTTTTTTTT | biotin TEG modified 5′ and |
| | | TTTTTTT[Phycoerythrin] | Phycoetrythrin modified 3′, |
| | | | where 5′ and 3′ linked by T30 |
| | | | (SEQ ID NO: 1546) |
| rep116 | 1456 | [FAM]n[branch]TTTTTTTTTTTTTTTTTTTT | 5′ modified with 9 FAMs and |
| | | [biotin TEG] | 3′ modified with biotinTEG, |
| | | | where 5′ and 3′ linked by T20 |
| | | | (SEQ ID NO: 126) |
| rep117 | 1457 | [BiotinTEG]*T*T*[internalFAM]*TTTTTTTT | 5′ modified with BiotinTEG |
| | | TTTTTTTTTTTT[IABKFQ] | and 3′ modified with FQ, |
| | | | where 5′ and 3′ linked by T20 |
| | | | (SEQ ID NO: 126) |
| rep118 | 1458 | [FAM]TTTTTTTTTTTTTTTTTTTT* | 5′ modified with FAM and 3′ |
| | | [internalBiotin]*T[IABKFQ] | modified with Biotin-FQ, |
| | | | where 5′ and 3′ are linked by |
| | | | T20 (SEQ ID NO: 126) |
| rep119 | 1459 | [5BiotinTEG]*T*T*[internalCy5]*TTTTTTTT | 5′ modified with BiotinTEG |
| | | TTTTTTTTTTTT[RQ] | and 3′ modified with BHQ-2, |
| | | | contains internal Cy5 dye |
| | | | linked to quencher by T20 |
| | | | (SEQ ID NO: 126) |
| rep121 | 1460 | /5BiotinTEG//iSp18//iCy5/TTT TTT TTT TTT | 5′ modified with BiotinTEG, |
| | | TTTTTT TT/3IAbRQSp/ | an internal 18 atom spacer, and |
| | | | an internal Cy5 followed by |
| | | | T20 (SEQ ID NO: 126) and a |
| | | | IAbRQSp quencher |
| rep120 | 1461 | [Cy5]TTTTTTTTTTTTTTTTTTTT* | 5′ modified with Cy5 followed |
| | | [internalBiotin]*T[RQ] | by T20 linker (SEQ ID NO: |
| | | | 126) to an internal biotin and |
| | | | an RQ quencher. * indicates |
| | | | phosphorothioated nucleotides |
| rep125 | 1462 | /5Alex647N//iBiodT/TTT TTT TTT TTT TTT | 5′ modified with Alexa647 |
| | | TTT TT/3IAbRQSp/ | followed by an internal |
| | | | biotindT T20 (SEQ ID NO: |
| | | | 126) and a 3′ IAbRQSp |
| | | | quencher |
| rep126 | 1463 | /5BiotinTEG/TT/i6- | 5′ biotinTEG modified |
| | | FAMK/TTTTTTTTTrUrUrUrUrUTTTTTT/ | followed by two T, an internal |
| | | 3IABKFQ/ | FAM and, 10T, 5 RNA U, 6T, |
| | | | and a quencher. Acts as an |
| | | | RNA cleavage reporter. |
| rep110 | 1464 | /5AmMC6T/TTTTTTTTTTTT/3AlexF488N/ | 5′ amino with 6 carbons |
| | | | followed by T12 (SEQ ID NO: |
| | | | 127) and a Alexa488 |
| | | | modification on 3′ end |
| rep111 | 1465 | /5AmMC6T//i6- | 5′ amino with 6 carbons |
| | | FAMK/TTTTTTTTTTTT/3IABKFQ/ | followed by internal FAM, |
| | | | T12 (SEQ ID NO: 127), and a |
| | | | quencher on 3′ |
| rep112 | 1466 | /5AmMC6T/TT TTT TTT TTT T/36-FAM/ | 5′ amino with 6 carbons |
| | | | followed by T12 (SEQ ID NO: |
| | | | 127) and a 3′ FAM |
| | | | modification |
| rep122 | 1467 | /5AmMC12//iSp18//iCy5/TTT TTT TTT TTT | 5′ amino with 12 carbons |
| | | TTTTTT TT/3IAbRQSp/ | followed by 18 atom linker |
| | | | followed by Cy5 followed by |
| | | | T20 (SEQ ID NO: 126) and a |
| | | | 3′ quencher |
| rep123 | 1468 | /5AmMC12//iCy5/TTT TTT TTT TTT TTT | 5′ amino with 12 carbons |
| | | TTT TT/3IAbRQSp/ | followed by internal Cy5 and a |
| | | | T20 linker (SEQ ID NO: 126) |
| | | | to a 3′ quencher |
| rep135 | 1469 | /5AmMC12//i6- | 5′ amino with 12 carbons |
| | | FAMK/TTTTTTTTTTTTTTTTTTT/3IABKFQ/ | followed by internal FAM and |
| | | | a T20 linker (SEQ ID NO: |
| | | | 126) to a 3′ quencher |
| rep136 | 1470 | /5AmMC6//i6- | 5′ amino with 6 carbons |
| | | FAMK/TTTTTTTTTTTTTTTTTTT/3IABKFQ | followed by internal FAM and |
| | | | a T20 linker (SEQ ID NO: |
| | | | 126) to a 3′ quencher |
| mod026 | 1471 | /5AmMC6/rUrArArUrUrUrCrUrArCrUrArAr | 5′ amino with 6 carbons linked |
| | | GrUrGrUrArGrArUrCrCrCrCrCrArGrCrGrCr | to gRNA for SARS-CoV-2 N- |
| | | UrUrCrArGrCrGrUrUrC | gene |
| mod027 | 1472 | /5AmMC12/rUrArArUrUrUrCrUrArCrUrArAr | 5′ amino with 12 carbons |
| | | GrUrGrUrArGrArUrCrCrCrCrCrArGrCrGrCr | linked to gRNA for SARS- |
| | | UrUrCrArGrCrGrUrUrC | CoV-2 N-gene |
| mod028 | 1473 | /5AmMC6T/rUrArArUrUrUrCrUrArCrUrArAr | 5′ amino with 6 carbons on dT |
| | | GrUrGrUrArGrArUrCrCrCrCrCrArGrCrGrCr | linked to gRNA for SARS- |
| | | UrUrCrArGrCrGrUrUrC | CoV-2 N-gene |
| mod029 | 1474 | rUrArArUrUrUrCrUrArCrUrArArGrUrGrUrAr | gRNA for SARS-CoV-2 N- |
| | | GrArUrCrCrCrCrCrArGrCrGrCrUrUrCrArGrC | gene with 5′ amino with 6 |
| | | rGrUrUrC/3AmMC6T/ | carbons on 3′ end |
| mod030 | 1475 | /5AmMC12/rUrArArUrUrUrCrUrArCrUrArAr | 5′ amino with 12 carbons |
| | | GrUrGrUrArGrArUrUrUrArCrArUrGrGrCrUr | linked to gRNA for human |
| | | CrUrGrGrUrCrCrGrArG | RNase P POP7 |
| mod031 | 1476 | /5AmMC12/rUrArArUrUrUrCrUrArCrUrArAr | 5′ amino with 12 carbons |
| | | GrUrGrUrArGrArUrGrCrCrGrArUrArArUrGr | linked to gRNA for |
| | | ArUrGrUrArGrGrGrArU | Mammuthus primigenius |
| | | | control sequence |
| mod059 | 1477 | /5ThioMC6-D/rUrA rArUrU rUrCrU rArCrU | 5′ thiol modification with 6 |
| | | rArArG rUrGrU rArGrA rUrCrC rCrCrC | carbons linked to gRNA for |
| | | rArGrC rGrCrU rUrCrA rGrCrG rUrUrC | SARS-CoV-2 N-gene |
| rep130 | 1478 | /5ThioMC6-D/*T*T*/i6- | 5′ modified with BiotinTEG |
| | | FAMK/*TTTTTTTTTTTTTTTTTTTT/3IABkFQ/ | and 3′ modified with FQ, |
| | | | where 5′ and 3′ linked by T20 |
| | | | (SEQ ID NO: 126); two |
| | | | phosphorothioated nucleotides |
| | | | between thiol and internal |
| | | | FAM |
| mod024 | 1479 | /5BiotinTEG/rUrArArUrUrUrCrUrArCrUrArA | 5′ modified with BiotinTEG |
| | | rGrUrGrUrArGrArUrGrCrCrGrArUrArArUrGr | linked to a gRNA that targets |
| | | ArUrGrUrArGrGrGrArU | Mammuthus primigenius |
| | | | sequence |
| mod025 | 1480 | /5BiotinTEG/rUrArArUrUrUrCrUrArCrUrArA | 5′ modified with BiotinTEG |
| | | rGrUrGrUrArGrArUrUrUrArCrArUrGrGrCrUr | linked to a gRNA that targets |
| | | CrUrGrGrUrCrCrGrArG | human RNase P POP7 |
| mod058 | 1481 | /5biotinTEG/rUrArArUrUrUrCrUrArCrUrArA | 5′ modified with BiotinTEG |
| | | rGrUrGrUrArGrArUrCrUrGrCrCrArArUrUrGr | linked to a gRNA that targets |
| | | CrArGrGrArArUrGrArU | Mammuthus primigenius |
| | | | sequence |
| Acrydite- | 1482 | (/5Acryd/TTT TTT TTT TTT TTT TTT TT/i6- | 5′ modified with acrydite for |
| modified | | FAMK//3Bio/). | incorporation into hydrogel |
| Reporter | | | |
| 172 | | | |
| R1763 | 1483 | /5Acryd/UAA UUU CUA CUA AGU GUA | R1763 modified at 5′ end with |
| with | | GAU CCC CCA GCG CUU CAG CGU UC | acrydite for incorporation into |
| Acrydite | | | hydrogel |
| Modifi- | | | |
| cation | | | |
| R1965 | 1484 | /5Acryd/rUrArAr UrUrUr CrUrAr CrUrAr | R1965 modified at 5′ end with |
| with | | ArGrUr GrUrAr GrArUr UrUrAr CrArUr | acrydite for incorporation into |
| Acrydite | | GrGrCr UrCrUr GrGrUr CrCrGr Ar G | hydrogel |
| Modifi- | | | |
| cation | | | |
| rep138 | | /5AmMC12//i6- | 5′ modified with amino |
| | | FAMK/rUrUrUrUrUrUrUrUrU/3IABKFQ/ | modifier C12 followed by an |
| | | | internal 6-FAMK and 3′ |
| | | | IABKFQ quencher |
| rep198 | | /5BiotinTEG//i6- | 5′ modified with BiotinTEG |
| | | FAMK/rUrUrUrUrUrUrUrUrU/3IABkFQ/ | followed by an internal 6- |
| | | | FAMK and 3′ IABKFQ |
| | | | quencher |

[0432] FIGS. 20A-20C illustrate three exemplary immobilization strategies for CRISPR-Cas diagnostic assay components. In some embodiments, as seen in FIG. 20A, chemical modifications of amino acid residues in the Cas protein enable attachment to a surface. In some embodiments, as seen in FIG. 20B, gRNAs are immobilized by adding various chemical modifications at the 5′ or 3′ end of the gRNA that are compatible with a selected surface chemistry. In some embodiments, as seen in FIG. 20C fluorescence-quenching (FQ), or other reporter chemistries, are attached to surfaces using similar chemical modifications as gRNAs. In some embodiments, these attached reporters are activated by a Cas protein, which leads to either activated molecules that remain attached to the surface or activated molecules that are released into solution.

[0433] For some embodiments, described herein, FIG. 21 provides an illustrative example of immobilization strategies for use with methods and compositions described herein where the RNP complex is immobilized by a gRNA and cleaves surrounding FQ reporters that are also immobilized to a surface. Here, the quencher is released into solution, leaving a localized fluorescent signal.

[0434] In some embodiments, the programmable nuclease, guide nucleic acid, or the reporter are immobilized to a device surface by a linkage or linker. In some embodiments, the linkage comprises a covalent bond, a non-covalent bond, an electrostatic bond, a bond between streptavidin and biotin, an amide bond, or any combination thereof. In some embodiments, the linkage comprises non-specific absorption. In some embodiments, the programmable nuclease is immobilized to the device surface by the linkage, wherein the linkage is between the programmable nuclease and the surface. In some embodiments, the reporter is immobilized to the device surface by the linkage, wherein the linkage is between the reporter and the surface. In some embodiments, the guide nucleic acid is immobilized to the surface by the linkage, wherein the linkage is between the 5′ end of the guide nucleic acid and the surface. In some embodiments, the guide nucleic acid is immobilized to the surface by the linkage, wherein the linkage is between the 3′ end of the guide nucleic acid and the surface.

[0435] In some embodiments, various chemical modifications to gRNAs are described as shown in FIG. 22. The y-axis shows reaction rate in terms of fluorescence intensity over time and the x-axis presents various modifications of crRNA. In some embodiments, unmodified biotin and variations of biotin modifications are placed at various positions along a Cas12 variant (e.g., SEQ ID NO: 17) gRNA. The modified gRNAs are then complexed with the protein and dsDNA target is added. In some embodiments, higher average fluorescence over the same period of time indicates that modifications are tolerated on the 5′ and 3′ ends of the gRNA, but not internally in the gRNA. 5′ modified gRNAs appear to be more robust than 3′ modifications.

[0436] In some embodiments, the immobilization of gRNAs to a streptavidin surface are described as shown in FIG. 23. Two plots are shown, where the left-hand plot depicts RNA bound to a streptavidin coated surface and the right-hand plot depicts unbound control-RNA, in solution, mixed with target, reporter and protein solution. In each table, the y-axis depicts, in some embodiments, various modifications of crRNA and the x-axis depicts various buffer conditions that the crRNA is subjected to. The left-hand, experimental plot shows gRNA on 5′ or 3′ side are both functional approaches, but 5′ biotin modified gRNAs show increased signal in comparison to 3′ modified gRNAs. In some embodiments, unmodified gRNAs show no signal when bound to the plate. Conversely, the right-hand control plot depicts an unbound control where, in some embodiments, free gRNA is mixed with target, reporter, and protein solution. In this embodiment, sufficient signal is observed, indicating functionality in unmodified gRNAs.

[0437] In some embodiments, Cas proteins are complexed with RNA complexes as described herein and shown in FIG. 5. FIG. 24 shows RNP complexes bound by 5′ biotin modified gRNAs exhibit higher signal, indicating functional attachment to the surface of the streptavidin coated plate. Samples exposed to unbound, high salt “B&W” buffer conditions show less fluorescence signal indicating inhibited protein activity or disruption of binding of functional RNP complexes to the surface of the plate. Unmodified gRNAs also exhibit lower fluorescence indicating failed binding to the RNP to the plate surface. Control assays, shown in the right-hand plot, indicate unbound gRNAs are still functional.

[0438] In some embodiments, reporters are immobilized to the surface as shown in FIGS. 25A-25B. FIG. 25A shows a fluorescence image of four wells with streptavidin coated surfaces, where the left-hand column of wells contains FAM-biotin reporters immobilized to a streptavidin coated surface. The right-hand column of wells contains FAM reporter without biotin functionalization. The left-hand column exhibits a higher signal. FIG. 25B shows a comparison of fluorescence intensity of the FAM-biotin pre-binding solution to the solution after incubating on the streptavidin plate. A decrease in signal for both wells containing FAM-biotin is observed.

[0439] In some embodiments, combined RNP and a reporter system are immobilized for functional testing as shown in FIG. 26. Raw fluorescence (AU) is plotted against three conditions: (1) unmodified crRNA in solution, (2) unmodified crRNA bound to the surface and (3) 5′ biotin-TEG modified crRNA bound to the surface. The combined binding of the reporter and RNP to the plate shows a similar signal to RNP in solution with bound reporter.

[0440] In some embodiments, different reporters are immobilized in combination with Cas complexes on a streptavidin surface for evaluation of the DETECTR assay. FIGS. 27A-27E present results for evaluation of different reporters for immobilization in combination with Cas complex immobilization on a streptavidin surface. In each figure, raw fluorescence is plotted against time in minutes representing kinetic binding curves for each type of reporter while binding with a positive control (+) and negative control (−) target. FIG. 27A presents the binding results for a FAM-biotin reporter, “rep” composed of the fluorophore FAM and biotin and is listed as rep72. The FIG. 27B plots the raw fluorescence for a reporter composed of the fluorophore AlexaFluor488, “AF488,” and TA10-internalBiotinQ. As predicted the positive control shows a positive slope indicating increased binding over the course of the reaction. This is due to the release of FAM dye into solution upon binding and transcleavage. In rep 104 the cleavage point is between the FAM and the biotin, while the biotin in all reporters is the attachment point to the streptavidin surface. FIG. 27C plots the control, target binding kinetic plot for rep 105. Rep105 is composed of biotin-FAM-T16-FQ. In this case the streptavidin coated surface emits fluorescence because the region between the FAM dye and the quencher is cleaved upon binding and the quencher is released. FIG. 27D plots the control for rep117. Rep117 is composed of biotin-FAM-T20-FQ. In this embodiment, the reporter is cleaved between the FAM dye and the quencher, thus allowing for release of the quencher in the solution upon binding and transcleavage. This in turn, causes the surface to emit fluorescence. FIG. 27E plots the control for rep118. Rep118 is composed of FAM-T20-biotin-FQ. In this embodiment, the solution emits fluorescence because upon binding the nucleic acid region between the biotin and the FAM is transcleaved, thus releasing the FAM into solution.

[0441] In some embodiments, Cy5 dye may be used as a reporter or a component of a reporter. FIGS. 28A-28C present results for the Cy5 reporter (rep 108) showing that it is functional for DETECTR but produces a weaker signal (might be gain related). FIGS. 28A and 28B plot raw fluorescence versus reporter type for channels configured to read Cy5 dye and Alexa Fluor 594 “AF594” dye, respectively. In these plots the average raw fluorescence is shown for each reporter. Reporter, rep033, readout in the “AF594” channel had the most significant fluorescence signal. FIG. 28C plots raw fluorescence for various combinations of excitation and emission wavelengths on a plate reader for Cy5 dye. Under similar assay conditions AF594 exhibits stronger signal than Cy5, but Cy5 is functional. Optimum excitation and emission wavelengths for Cy5 are shown to be 643 nm and 672 nm, respectively.

[0442] FIGS. 29A-29F present results for optimization of the complex formation step where certain components are immobilized, as described herein. In each figure raw fluorescence is plotted against time in minutes. FIGS. 29A-29C show results for replicate 1. FIGS. 29D-29F show results for replicate 2. In FIGS. 29A and 29D the reporter and gRNA are immobilized. In FIGS. 29B and 29E all components are in solution. In FIGS. 29C and 29F the reporter and gRNA are immobilized and Cas12 and target are added at the same time.

[0443] FIGS. 30A-30B present results for immobilization optimization involving a gRNA/reporter binding time and reporter concentration. FIG. 30A is a measurement of supernatant of the surface reaction over time showing the fluorescence dropping and thus indicating uptake of biotinylated dye reporter by the streptavidin surface. In this embodiment a 15 min binding time is found to be sufficient.

[0444] In some embodiments, gRNAs are modified. In some embodiments, the modified gRNAs are modified with linker molecules for immobilization onto a surface. FIGS. 31A-31C present results showing target discrimination of modified gRNAs.

[0445] In some embodiments, guide RNAs are modified for surface modification. In some embodiments, reporters are modified for surface immobilization. In these embodiments, an immobilized gRNA, or immobilized reporter or a combination thereof participate in a diagnostic assay including a programmable nuclease. FIGS. 32A-32E present results demonstrating functionality of biotin-modified Cas13a gRNA. In each figure, raw fluorescence is plotted against time in minutes, where the dashed line series represents data for when the target is present, and the thin solid line with low amount of speckle for boundaries series represents when target is not (no target control or NTC). FIGS. 32A and 32B show results, in solution, for mod023, the biotin modified reporter and R003 the non-biotin-modified reporter, respectively. In some embodiments the biotin-modified gRNA has similar performance to the non-biotin-modified gRNA in solution. FIG. 32C shows results for gRNA that was modified with biotin and immobilized to the surface. FIG. 32D shows results for gRNA that was not modified with biotin but was deposited on the surface in the same manner as FIG. 32C. FIG. 32E, similar to FIGS. 32A and 32B, shows results for gRNA that was unmodified and in solution. Together these results showed that with biotin modification and surface immobilization functionality was maintained and DETECTR assay performance was not adversely affected.

[0446] In some embodiments, biomolecules are immobilized to surfaces. In some embodiments, the surfaces were glass. FIG. 33 shows results for the test reporter, Rep072, and the negative control, Rep106. The replicates of Rep072 at 5 μM show the strongest signal and the three replicates of Rep072 at 1 μM concentration show the next strongest signal. The negative control reporter, rep 106 shows the same low signal (on none at all) for both 5 μM and 1 μM concentrations. This result shows specific binding of a FAM-biotinylated reporter with a 30 minute incubation time at both 5 μM and 1 μM concentrations. FIGS. 34A-34B show similar results with reporters at 5 mM concentrations in FIG. 34A and 2.5 mM concentrations in FIG. 34B. The top row of FIGS. 34A and 34B show spots exhibiting bright fluorescence and the bottom row of FIGS. 34A and 34B show spots exhibiting similarly low fluorescence.

[0447] Experimental parameters for the preparation of an embodiment of a complexing mix are seen in FIG. 35.

[0448] In some embodiments, fluorescent quencher-based reporters are used in the immobilized DETECTR assay. FIG. 36 shows sequence and other details for reporters used in some embodiments. In some embodiments, reporters rep072, rep104, rep105, rep117 and rep118 are used for binding to a reader plate. Reporter binding details and complexing mix parameters as seen in FIGS. 37A and 37B, respectively for some embodiments.

[0449] Described herein are various embodiments, where both the gRNA and reporter are bound to a plate as opposed to the gRNA, reporter and CAS protein. This removes the need to functionalize the surface with the pre-complex of gRNA and CAS protein, allowing for an easier manufacturing process. Additionally, greater specificity can be achieved by allowing for more stringent washes. An experimental design of this embodiment and conditions for binding a reporter to a plate in this embodiment are seen in FIGS. 38A and 38B, respectively. Complexing reactions for mod018 (5′ biotin-TEG R1763 SARS-CoV-2 N-gene) and R1763 CDC-N2-Wuhan prepared for a particular embodiment according to the conditions presented in FIG. 39A. Two sets of full complexing mix for an embodiment are seen in FIG. 39B.

[0450] Described herein are various embodiments, that demonstrate target discrimination for immobilized reporters for the DETECTR reaction. An experiment design for such an embodiment is shown in FIG. 40A and reporter binding conditions shown in FIG. 40B. Reaction conditions are shown FIGS. 41A and 41B. PCR conditions are shown in FIG. 42.

[0451] In some embodiments, a pneumatic pump interfaces with the cartridge. In some embodiments, as shown in a top down view, in the middle of FIG. 43 of the device may comprise a cartridge with a top layer which may comprise reservoirs. Shown at the bottom of FIG. 43 the device may comprise a sliding valve containing the sample. In some embodiments, the device may comprise a lysis chamber shown at left, followed by amplification chambers to the right, and detection chambers further to the right.

[0452] In some embodiments, the DETECTR assay device may comprise a sliding valve as seen in FIG. 44. In some embodiments offset pitch of the channels allows aspirating and dispensing into each well separately and helps to mitigate cross talk between the amplification chambers and corresponding chambers. In some embodiments, a sample moves through the sliding valve device as seen in FIG. 45.

[0453] In some embodiments, NHS-Amine chemistry is used for immobilization of DETECTR components. FIG. 83 presents a schematic of combined gRNA and reporter immobilization and results for such embodiments. In this embodiment, a functional DETECTR reaction was immobilized to an NHS modified surface of a support using primary amine modified reporters and gRNAs. In the example shown, a modified reporter (rep111) was bound to the surface in combination with either an unmodified crRNA (R1763) or a modified crRNA (mod027). After incubating these nucleic acids on the surface, the surface was washed 3 times, and then a Cas12 variant (SEQ ID NO: 17) was added with the target dsDNA. The immobilized DETECTR reaction was then incubated in a plate reader at 37 C for 60 minutes with continuous monitoring of the fluorescence.

[0454] FIG. 84 presents results for various embodiments involving the optimizing conjugation buffer to reduce non-specific binding. For some embodiments, 1× Conjugation Buffer 3 (CB3) was selected as the buffer to perform binding studies. I was found that CB3 improved the binding of the amine-modified reporter (rep111) and reduced the binding of a biotinylated reporter (rep117) which should not bind to NHS covalently. In some embodiments, the wash buffer used was 1× MB3. In some embodiments, 1× MB3: 20 mM HEPES, pH 7.2, 2 mM KOAc, 5 mM MgAc, 1% Glycerol, 0.0016% Triiton X-100 was used. In some embodiments, 1× CB2: 20 mM HEPES, pH 8.0, 2 mM KOAc, 5 mM MgAc, 1% Glycerol, 0.0016% Triiton X-100 was used. In some embodiments, 1× CB3: 100 mM HEPES, pH 8.0, 10 mM KOAc, 25 mM MgAc was used.

[0455] In some embodiments, different combinations of reporter+guide+a Cas12 variant (SEQ ID NO: 17) are immobilized. FIG. 85 presents results of such embodiments, involving the optimization the assay. For such embodiments, it was found that immobilizing guide and reporter first followed by the addition of a Cas12 variant (SEQ ID NO: 17) and target at the same time gave sufficient signal.

[0456] The results for optimizing gRNA and target concentrations to improve single-to-noise ratio for immobilized DETECTR assay are shown in FIG. 86. In some embodiments, guide concentration is increased while keeping reporter concentration constant at 0.5M, as seen on the left of FIG. 86, In such embodiments, the signal is not changed very much. In some embodiments, as seen on the right of FIG. 86, increasing target concentration 2-fold helped improve the overall signal with rep135. Additionally, for such embodiments, rep135 gave a better signal strength compared to rep111. The sequences for the two reporters are: rep111: 5AmMC6T//16-FAMK/TTTTTTTTTTTT/3IABKFQ/(SEQ ID NO: 1490) and rep 135: 5AmMC12//16-FAMK/TTTTTTTTTTTTTTTTTTT/3IABKFQ/(SEQ ID NO: 1491).

[0457] In some embodiments, amino modifications are used for DETECTR immobilization. FIG. 87 presents results for such embodiments. For each subplot raw fluorescence is plotted against time in minutes. Each of the four subplots represent different modifications. The solid line trace represents the no target control (NTC) and the dashed line trace represents a 1:10 dilution of target-GF676.

[0458] In some embodiments, rapid thermocycling and CRISPR diagnostics are used to detect SARS-CoV-2. Results are shown in FIG. 88. For some embodiments, polymerase and buffer combinations were identified that enabled the rapid amplification of SARS-CoV-2 using the N2 primers from the CDC assay. The assay of such embodiments was performed at two target concentrations: 2 copies/reaction and 10 copies/reaction. In some embodiments, reaction conditions are as follows: initial denaturation at 98 C for 30 seconds, followed by 45 cycles consisting of 1 second at 98 C and 3 seconds at 65 C. Following thermocycling, amplicon was transferred to a Cas12 variant (SEQ ID NO: 17) detection reaction for 30 minutes at 37° C. Best performing enzyme/buffer pairs shown in FIG. 88 were those that gave strong signal in both tested concentrations.

[0459] The top enzymes and buffers identified previously at various concentrations and with multiple replicates were tested for the FASTR assay. In some embodiments, the best performing enzymes and buffers as identified in the previously disclosed screening studies were used. Results of such embodiments are shown in FIG. 89. Reaction conditions of such embodiments are as follows: initial denaturation at 98 C for 30 seconds, followed by 45 cycles consisting of 1 second at 98 C and 3 seconds at 65 C. Primers used were from the CDC N2 assay for SARS-CoV-2. Following thermocycling, amplicon was transferred to a Cas12 variant (SEQ ID NO: 17) detection reaction for 30 minutes at 37 C. The data present is the signal from the CRISPR reaction. Best performing enzyme/buffer pairs were those that gave strong signal at the lowest tested concentrations and with detection across replicates.

[0460] For some embodiments, single copy detection of SARS-CoV-2 with FASTR assay has been demonstrated as shown in FIG. 90. In some embodiments, the limit of detection of the FASTR assay was evaluated using solutions composed of 1000 copies of SARS-CoV-2 per reaction to 1 copy per reaction. For some embodiments, reaction conditions are as follows: reverse transcription at 55 C for 60 seconds, initial denaturation at 98 C for 30 seconds, followed by 45 cycles consisting of 1 second at 98 C and 3 seconds at 65 C. Primers used were from the CDC N2 assay for SARS-CoV-2. Following thermocycling, amplicon was transferred to a Cas12 variant (SEQ ID NO: 17) detection reaction for 30 minutes at 37 C. The data presented in FIG. 90 is the signal from the CRISPR reaction. It was found that the limit of detection of the CRISPR assay was 1 copy of SARS-CoV-2 per reaction.

[0461] Variations on Across some embodiments, rapid cycling times are varied to evaluate denaturation and annealing/extension for the FASTR assay. Results for such embodiments are shown in FIG. 91. In some embodiments, reverse transcription is run at 55C for 60 seconds and initial denaturation at 98 C for 30 seconds. In some embodiments, the tested cycling conditions were: 98 C for 1 second, 65 C for 3 seconds; 98 C for 2 seconds, 65 C for 2 seconds; or 98 C for 1.5 seconds, 65 C for 1.5 seconds. In some embodiments, primers used were from the CDC N2 assay for SARS-CoV-2. Following thermocycling, amplicon was transferred to a Cas12 variant (SEQ ID NO: 17) detection reaction for 30 minutes at 37 C. The results shown in FIG. 91 indicate that >2 seconds of annealing/extension time at 65 C are necessary for robust sensitivity.

[0462] FIG. 92 presents results for Minimizing RT time for FASTR. The performance of the FASTR assay was evaluated, for various embodiments, where the reverse transcription incubation times were varied holding temperature at 55 C. The results shown in FIG. 92 indicate the assay is most robust above 30 seconds of reverse transcription.

[0463] FIG. 93 presents results for Higher pH buffers improve FASTR performance. In some embodiments, the FASTR assay utilizes buffers with pH of either 9.2 or pH 7.8. The FASTR assay was evaluated using these buffer pH values. The results as shown in FIG. 93 indicate that the higher pH buffer produced superior results in terms of amplicon yield and sensitivity.

[0464] For some embodiments, the FASTR assay compatibility with crude lysis buffers was investigated. Results are shown in FIG. 94 where there are three row groups, each consisting of two sub rows representing a buffer and control from top to bottom respectively. The buffers, VTES, A3 and Elution buffer are plotted against a control, from top to bottom, respectively. In FIG. 94 there are also 7 subgroups showing the number of copies decreasing from left to right. For certain embodiments, the performance of the FASTR assay when combined with various crude lysis buffers was evaluated, where crude lysis buffers VTE5, A3, and the Elution Buffer from the ChargeSwitch kit (Thermo) were tested. For certain embodiments, the FASTR assay performed best for VTE5, but was performed slightly less robustly in the A3 buffer and the Elution Buffer from the ChargeSwitch kit performed similarly to the control reactions (water).

[0465] For some embodiments non-optimized multiplexing of FASTR was demonstrated as shown in FIG. 95. In FIG. 95, raw fluorescence is plotted in the y-axis and time is plotted in the x-axis for each sub-plot. Each column illustrates a particular sequence: R1965 and R1763, respectively Each row represents duplex, RNase P, N2 and the no target control, from top to bottom respectively. For some embodiments, initial testing of multiplexed FASTR for SARS-CoV-2 and RNase P POP7 (endogenous control) showed that while the single-plex assays generated a robust signal in DETECTR, the duplex assay tended to generate a weak signal for SARS-CoV-2 (R1763) and almost no signal for RNase P (R1965). In some embodiments, reaction conditions were as follows: reverse transcription at 55 C for 60 seconds, initial denaturation at 98 C for 30 seconds, followed by 45 cycles consisting of 1 second at 98 C and 3 seconds at 65 C. In some embodiments, primers from the CDC N2 assay for SARS-CoV-2, and M3637/M3638 were used.

[0466] In various aspects described herein, FASTR can be used for multiplexed detection, as shown in FIG. 96. The components of a FASTR reaction, such as primer concentration, dNTP concentration, presence/absence of DMSO, and other factors, can impact the performance of a multiplex FASTR reaction. FIG. 98 shows 18 different experimental conditions for a multiplex FASTR reaction targeting human RNase P POP7 and SARS-CoV-2. In FIG. 96 each row of the y-axis represents experimental runs 1-18 and each column represents the detection signal from a particular crRNA at a time point of 30 minutes in the reaction. The color represents the value of the raw fluorescence. In some embodiments, the multiplexed FASTR assay for SARS-CoV-2 and RNase P, comprise a set of SARS-CoV-2 primers (M3257/M3258). A series of experiments of such embodiments was performed with varied reaction conditions containing different combinations of buffers, primer concentrations, dNTPs, and DMSO. Results identified two reaction conditions that performed robustly for the multiplex reaction. In one of these embodiments, reaction 4, conditions consisted of: 1× FastBuffer 2; 1 μM RNase P primers; 0.5 μM CoV primers; 0.2 mM dNTPs; and 2% DMSO. In another embodiment, reaction 9, conditions consisted of: 1× Klentaq1 buffer; 1 μM RNase P primers; 0.5 μM CoV primers; 0.4 mM dNTPs; and 0% DMSO. In some embodiments, normal reaction conditions consisted of reverse transcription at 55 C for 60 seconds, initial denaturation at 98C for 30 seconds, followed by 45 cycles consisting of 1 second at 98 C and 3 seconds at 65 C. In various aspects, permissive reaction conditions consisted of reverse transcription at 55 C for 60 seconds, initial denaturation at 98 C for 30 seconds, followed by 45 cycles consisting of 3 seconds at 98 C and 5 seconds at 65 C.

[0467] In some embodiments, the FASTR assay enables multiplexed detection. Results of a limit of detection (LOD) study of such embodiments are shown in FIG. 97. In FIG. 97, the x-axis shows the number of copies per reaction for viral RNA and the y-axis of each subplot identifies the particular crRNA. Each subplot shows nanograms of human RNA per reaction, decreasing in concentration from left to right. The 4th subplot contains no human RNA, labeled as the no target control (NTC). For some embodiments, an optimized multiplexed FASTR assay was ran at various concentrations of human RNA and viral RNA. In some embodiments, results indicated that the assay performed at a range of human RNA concentrations, while maintaining a sensitivity of ˜5 copies per reaction. In certain aspects, results shown are from DETECTR reactions using either R1965 to detect the human RNase P, or R3185 (labeled M3309) to detect SARS-CoV-2. In various aspects, reaction conditions are as follows: reverse transcription at 55C for 60 seconds, initial denaturation at 98 C for 30 seconds, followed by 45 cycles consisting of 1 second at 98 C and 3 seconds at 65 C. In some embodiments, primers used were M3257/M3258 (SARS-CoV-2) and M3637/M3638 (RNase P).

[0468] In some embodiments, key primers and gRNAs have the sequences as listed in FIG. 98.

### Sample Preparation and Lyophilization

[0469] Described herein are various methods of sample preparation and reagent storage. Any of the devices described herein may comprise one or more sample preparation reagents Any of the devices described herein may comprise sample preparation reagents as dried reagents. Dried reagents may comprise solids and/or semi-solids. In certain instances, dried reagents may comprise lyophilized reagents. Any of the devices described herein may comprise one or more lyophilized reagents (e.g., amplification reagents, programmable nucleases, buffers, excipients, etc.). In certain instances, methods include sample lysis, concentration, and/or filtration. In certain instances, methods include reconstitution of one or more lyophilized reagents. In some embodiments, lyophilized reagents may be in the form of lyophilized beads, spheres, and/or particulates. In some embodiments, the lyophilized bead, sphere, and/or particulate may comprise either single or multiple compounds. In some embodiments, the lyophilized bead, sphere, and/or particulate may be adjusted to various moisture levels or hygroscopy. In some embodiments, the lyophilized bead, sphere, and/or particulate may comprise assay internal standards. In some embodiments, the lyophilized bead, sphere, and/or particulate may have diameters between about 0.5 millimeters to about 5 millimeters in diameter.

[0470] Described herein are various embodiments of the DETECTR reaction involving optimization of sample preparation and lyophilization. Such embodiments allow for adapting the buffer for binding a substrate to perform a concentration step. In some embodiments, experiments may be performed to evaluate the lysis (sample is evaluated directly in the assay) and binding (the sample is eluted from magnetic beads) characteristics of buffers with different components. In such embodiments, the input sample is the same concentration as the eluted sample. Results showing strong lysis activity, but minimal binding/concentration potential are shown in FIG. 46. Buffers a1, a3 and potentially all of such embodiments show acceptable binding activity. Buffer a5, of such embodiments, shows modest activity for both lysis and binding and buffer a2 is not suitable for either activity.

[0471] In some embodiments, crude lysis buffer is used in a one-pot assay with Cas14a.1. Results can be seen in FIG. 47.

[0472] In some embodiments, the enzyme Cas12 variant (SEQ ID NO: 17) is used with the DETECR assay. In some embodiments, the sequence of the Cas12 variant is: MKKIDNFVGCYPVSKTLRFKAIPIGKTQENIEKKRLVEEDEVRAKDYKAVKKLIDRYHR EFIEGVLDNVKLDGLEEYYMLFNKSDREESDNKKIEIMEERFRRVISKSFKNNEEYKKIFS KKIIEEILPNYIKDEEEKELVKGFKGFYTAFVGYAQNRENMYSDEKKSTAISYRIVNENM PRFITNIK VFEKAKSILDVDKINEINEYILNNDYYVDDFFNIDFFNYVLNQKGIDIYNAIIG GIVTGDGRKIQGLNECINLYNQENKKIRLPQFKPLYKQILSESESMSFYIDEIESDDMLID MLKESLQIDSTINNAIDDLKVLFNNIFDYDLSGIFINNGLPITTISNDVYGQWSTISDGWNE RYDVLSNAKDKESEKYFEKRRKEYKKVKSFSISDLQELGGKDLSICKKINEIISEMIDDYK SKIEEIQYLFDIKELEKPLVTDLNKIELIKNSLDGLKRIERYVIPFLGTGKEQNRDEVFYGY FIKCIDAIKEIDGVYNKTRNYLTKKPYSKDKFKLYFENPQLMGGWDRNKESDYRSTLLR KNGKYYVAIIDKSSSNCMMNIEEDENDNYEKINYKLLPGPNKMLPKVFFSKKNREYFAP SKEIERIYSTGTFKKDTNFVKKDCENLITFYKDSLDRHEDWSKSFDFSFKESSAYRDISEF YRDVEKQGYRVSFDLLSSNAVNTL VEEGKLYLFQLYNKDFSEKSHGIPNLHTMYFRSLF DDNNKGNIRLNGGAEMFMRRASLNKQDVTVHKANQPIKNKNLLNPKKTTTLPYDVYK DKRFTEDQYEVHIPITMNKVPNNPYKINHMVREQLVKDDNPYVIGIDRGERNLIYVVVV DGQGHIVEQLSLNEIINENNGISIRTDYHTLLDAKERERDESRKQWKQIENIKELKEGYIS QVVHKICEL VEKYDAVIALEDLNSGFKNSRVKVEKQVYQKFEKMLITKLNYMVDKKK DYNKPGGVLNGYQLTTQFESFSKMGTQNGIMFYIPAWLTSKMDPTTGFVDLLKPKYKN KADAQKFFSQFDSIRYDNQEDAFVFKVNYTKFPRTDADYNKEWEIYTNGERIRVFRNPK KNNEYDYETVNVSERMKELFDSYDLLYDKGELKETICEMEESKFFEELIKLFRLTLQMR NSISGRTDVDYLISPVKNSNGYFYNSNDYKKEGAKYPKDADANGAYNIARKVLWAIEQ FKMADEDKLDKTKISIKNQEWLEYAQTHCE* (SEQ ID NO: 17). The * indicates a stop codon.

[0473] FIG. 48 presents results for a control study involving sample preparation optimization of the LANCR (Cas12 variant DETECTR) assay using SEQ ID NO: 17. In such embodiments, crude lysis involves: 25 uL sample+25 uL lysis buffer and incubation at 25 C for 1 minute. In some embodiments, the LANCR reaction is run as follows: 5 uL sample in a 25 uL reaction volume (standard conditions). In some embodiments the DETECTR reaction is run as follows: 2 uL LANCR product in 20 uL reaction volume (standard conditions). Sample: 250 copies/reaction SeraCare.

[0474] For some embodiments, two groups of conditions were evaluated for lyophilization performance. For one embodiment, Group I, Trehalose is used. FIGS. 49A-49B presents lyophilization optimization results for the Group 1 using RT-LAMP assay is presented in FIG. 49A and the DETECTR assay as seen in FIG. 49B.

[0475] In another embodiment, Group II comprising: PVP 40; sorbitol; Mannitol; and Mannosse are used. FIGS. 50A-50B presents lyophilization optimization results for Group 2 evaluated using RT-LAMP 3-8% of the candidate excipient as shown in FIG. 50A and for Group 2 using the DETECTR assay conditions as seen in FIG. 50B.

[0476] FIGS. 51A-51B presents lyophilization optimization results for an embodiment of Group 2: PVP 40, Sorbitol, Mannitol, Mannose, using DETECTR MM with 3-5% of candidate excipient.

[0477] In some embodiments, Trehalose is used to control the rate of the reaction. FIG. 52 presents results from a study involving such embodiments, where RT-LAMP reaction components and various percentages of Trehalose were used.

[0478] FIGS. 53A-53B presents results of a study involving embodiments where DETECTR reaction components and Trehalose are used. The top row of subplots show results for increasing Trehalose percentages in liquid bulk solution. The bottom row show results for increasing Trehalose in lyophilized powder form. In such embodiments, primary drying lasts 90 hours, fill volume is 250 uL in a 2 mL vial; reconstituted with 250 uL water; secondary drying is 6 hours; and temperature ramp is 0.5° C. per minute.

[0479] Described herein are various methods and devices for carrying out DETECTR assays. In some embodiments, DETECTR assays utilize the Cas12 variant (SEQ ID NO: 17) protein. In some embodiments, RT-LAMP and DETECTR master mixes of reagents are lyophilized in the same combined master mix. In some embodiments, RT-LAMP and DETECTR master mixes of reagents and target are lyophilized in the same combined master mix. FIG. 99A presents results for a one-pot RT-LAMP assay. In some embodiments, one-pot refers to the combination of both RT-LAMP and DETECTR reaction reagents in one sample. FIG. 99B presents results for a Cas12 variant-based DETECTR assay using SEQ ID NO: 17. The left-hand y-axis plots raw fluorescence. The x-axis plots time in minutes. Subplot 1 presents results where master mixes were not lyophilized and did not contain excipients. Subplot 2 presents results where master mixes were not lyophilized but did contain excipients. In some embodiments, an excipient is used confirm reagent stability throughout the lyophilization process, comprising freezing and drying steps. In some embodiments, excipients are sugars. In some embodiments, excipients comprise one or more of the compounds listed in FIG. 105. Subplots 7 and 11 of FIG. 99A presents results of an embodiment of a master mix containing the excipients Trehalose and Raffinose, wherein Trehalose and Raffinose are included at various percentages as described on the right-hand y-axis. Subplot 7 presents results for a mixture with 10% Trehalose and 3% Raffinose. Subplot 11 exhibits data for a mixture with 10% Trehalose and 5% Raffinose. Subplot 8 exhibits data for a mixture with 10% Raffinose and 3% Trehalose. Subplot 12 exhibits data for a mixture with 10% Raffinose and 5% Trehalose.

[0480] In some embodiments, the reagents and target from both the RT-LAMP and DETECTR assays were lyophilized in one sample. FIG. 99B shows results for such an embodiment ran through a Cas12 variant-based DETECTR assay using SEQ ID NO: 17 and can be interpreted as FIG. 99A has been described.

[0481] In some embodiments, the sample mixtures include multiple target nucleic acids. In some embodiments, the sample mixtures contain multiple copies of nucleic acid targets. In some embodiments, the 1000 copies (cps) of the nucleic acid target are present in one sample. In the legends on the right-hand sides of FIGS. 99A-99B, “1000 cps” refers to 1000 copies of the target and is represented as a solid line. NTC refers to no-target-control and is represented as a large dashed line. The thin solid lines bounding all data series of FIGS. 99A-99B, 100, 101, 102A-102B and 103 represent bounds of the data set. Additionally, in some embodiments, “mix. iteration” refers to the form of the master mix, wherein “Liquid” refers to master mixes that were not lyophilized, represented as a solid line and “Lyo” refers to master mixes that were lyophilized and is represented as a small dashed line.

[0482] In some embodiments, a master mix of assay reagents are reconstituted after lyophilization. In some embodiments, a master mix of DETECTR assay reagents are reconstituted after lyophilization. In some embodiments, a master mix of DETECTR assay reagents, including a Cas 12 variant (SEQ ID NO: 17) protein are reconstituted after lyophilization. In some embodiments, a master mix of amplification and DETECTR assay reagents, including Cas12 variant (SEQ ID NO: 17) protein are reconstituted after lyophilization. In some embodiments, a master mix of RT-LAMP and DETECTR assay reagents, including Cas12 variant (SEQ ID NO: 17) protein are reconstituted after lyophilization. The results of a reconstituted lyophilized Cas12 variant DETECTR master mix using SEQ ID NO: 17 are shown in FIG. 100. The left-hand, y-axis plots raw fluorescence. The x-axis plots time in minutes. Subplot A contains results for a glycerol control (10001), IB1 buffer (10003) and water (10002), with no excipients present. Subplot B contains results for the one-pot control. Subplot G shows results for a sample containing 10% Trehalose and 3% Raffinose. Subplot K shows results for a sample containing 10% Trehalose and 5% Raffinose. Subplot H shows Raffinose and Trehalsose at 10% and 3%, respectively, and subplot L shows Raffinose and Trehalose at 10% and 5%, respectively. The bold solid trace shows the experimental series where IB1 reaction buffer was used. The thin solid lines, see FIGS. 99A-99B (9901), located on either side of the bold solid line representing the IB1 buffer, show the boundaries of the data.

[0483] FIG. 101 presents results for a Cas14a1-based DETECTR assay. The left-hand, y-axis plots raw fluorescence. The x-axis plots time in minutes. Subplot A presents results for non-lyophilized control master mix comprising an RT-LAMP pool as the target, seen as the solid line with speckled background for the data boundaries. The thin solid line with speckled background series) contains a non-lyophilized control with no target present. Subplots E, F, H and I present results for master mixes, with RT-LAMP pool as the target. Lyophilized master mixes with RT-LAMP pool as the target are represented by the solid line, while non-lyophilized master mixes are represented by the thin solid line with speckled background series. Lyophilized master mixes without target are represented by the bold line series and non-lyophilized samples without target are represented by the thin solid line with speckled background series. Additionally, subplot E contains excipients 10% Trehalose and 3% Raffinose. Subplot H contains 10% Trehalose and 5% Raffinose. Subplot F contains 10% Raffinose and 3% Trehalose and subplot I contains 10% Raffinose and 5% Trehalose.

[0484] In some embodiments, the master mix of reagents and target for one assay is lyophilized. In some embodiments, the master mixes from more than one assay are pooled and lyophilized. In some embodiments, a duration of time occurs between mixing and lyophilization. FIG. 102A and FIG. 102B present results of an embodiment where the master mixes for both RT-LAMP and Cas12 variant-based DETECTR assays using SEQ ID NO: 17 were each made, mixed together, and stored for two weeks prior to lyophilization. Subplot 1 of FIG. 102A presents results for a sample without excipient and was not lyophilized but was prepared immediately prior to running the RT-LAMP assay. Subplot 2 presents results for a sample that did not contain excipient and was lyophilized two weeks after initial preparation. Subplots 7, 8, 11, 12, 15 and 16 of FIG. 102A show results for samples containing various types and amounts of excipient as described on the axes. Each color line represents one of three replicates. The solid lines represent a concentration of 1000 copies of target per sample and the dashed line contain no targets. FIG. 102B shows similar results for the DETECTR assay ran on an aliquot of the same sample.

[0485] In some embodiments, lyophilized master mixes of reagents from more than one assay are prepared in volumes of less than 1 mL. In some embodiments, lyophilized master mixes of reagents from more than one assay are prepared in volumes of less than 250 uL. In some embodiments, lyophilized master mixes of reagents from more than one assay are prepared in volumes of less than 25 uL. In some embodiments, lyophilized master mixes of reagents from more than one assay are prepared in volumes of less than 10 uL. FIG. 103 presents results for lyophilized reactions at 25 uL in volume. Subplots A, B, C show results for an RT-LAMP assay. Subplot A shows RT-LAMP results for lyophilized sample with excipients, where the solid line represents a sample with 500 copies per sample of target and the dashed line represents a no target control. Subplot B presents results for non-lyophilized sample with excipients, where the solid line represents a sample with 500 copies per sample of target and the dashed line represents a no target control. Subplot C presents results for samples without excipients. Subplots D, E, and F show results for a Cas12 variant-based DETECTR assay using SEQ ID NO: 17. Subplots G, H and I show results for a Cas14-based DETECTR assay. For both assays, the solid lines show results for samples with the same targets used in the RT-LAMP assay, with three replicates. The dashed lines represent no target controls.

[0486] In some embodiments, lyophilized master mixes of assay reagents are analyzed by dynamic scanning calorimetry (DSC). FIG. 104 plots heat flow versus temperature in degrees Celsius for such an embodiment. In some embodiments, such measurements provide a measure of quality of the master mix throughout the lyophilization process, specifically the freeze dry steps. In some embodiments, DSC measurements yield a glass transition temperature which can be indicative of long-term stability of a sample.

[0487] In some embodiments, an excipient is used to stabilize the sample throughout the lyophilization process that may comprise freezing and drying steps. FIG. 105 presents a list of excipients as well as each excipient's primary/secondary status, function, freezing temperature (T_{f}) as determined by DSC, critical temperature (T critical) as determined by DSC, and event. In some embodiments, T_{critical} is the temperature required to ensure that the sample is fully frozen.

[0488] In some embodiments, the hygroscopicity of enzymes and reagents is optimized to improve lyophilization performance.

LAMP Amplification with Cas14a DETECTR in Single Reaction Volume (One-Pot)

[0489] Described herein are various methods of sample amplification and detection in a single reaction volume. Any of the devices described herein may be configured to perform amplification and detection in a same well, chamber, channel, or volume in the device. In certain instances, methods include simultaneous amplification and detection in the same volume. In certain instances, methods include sequential amplification and detection in the same volume. In some embodiments, sample amplification may comprise LAMP amplification.

[0490] FIGS. 54A-54B presents results for an embodiment of HotPot involving LAMP amplification with Cas14a DETECTR in single reaction volume (one-pot) In such an embodiment, Cas14 fails to function as a one-pot in standard LAMP conditions. In some embodiments, Cas14a was tested to see if it can function in a one-pot reaction using LowLAMP at 50 C using Klenow (exo-) as the DNA polymerase. (a) The signal from SYTO9, a DNA binding dye, indicates the production of DNA by LAMP. It was confirmed that LowLAMP was able to generate DNA amplicon in the presence of Cas14 in three different buffers. (b) The signal from the Cas14 FQ reporter in the one-pot reaction condition shown in (a). No signal was detected in the one-pot reaction, even though DNA was generated. For this embodiment, results suggest that Cas 14 is inhibited in the LAMP reaction.

[0491] For some embodiments, RT-LAMP can be performed at lower temperatures by using Klenow (exo-) or Bsu polymerases: LowLAMP. RT-LAMP is normally performed at temperatures between 55C-70 C. Results can be seen in FIG. 55. This temperature range is influenced by the polymerase used. In standard RT-LAMP, a Bst or Bsm polymerase is used which show peak activity above 55 C. In this embodiment, the performance of RT-LAMP at temperatures from 37 C to 50 C. By using Klenow (exo-) and Bsu polymerases was evaluated and demonstrated functional RT-LAMP on an RNA target of SARS-CoV-2 at temperatures as low as 40 C. For this embodiment, the performance of these enzymes in 4 different buffers was tested and peak activity for Klenow (exo-) was observed at 50 C, and peak activity for Bsu was at 45 C. For some embodiments, this method is called LowLAMP, as it functions at lower temperatures than standard RT-LAMP.

[0492] The Cas14a1 sequence is:

(SEQ ID NO: 3)
MAKNTITKTLKLRIVRPYNSAEVEKIVADEKNNREKIALEKNKDKVKEA
CSKHLKVAAYCTTQVERNACLFCKARKLDDKFYQKLRGQFPDAVFWQEI
SEIFRQLQKQAAEIYNQSLIELYYEIFIKGKGIANASSVEHYLSDVCYT
RAAELFKNAAIASGLRSKIKSNFRLKELKNMKSGLPTTKSDNFPIPLVK
QKGGQYTGFEISNHNSDFIIKIPFGRWQVKKEIDKYRPWEKFDFEQVQK
SPKPISLLLSTQRRKRNKGWSKDEGTEAEIKKVMNGDYQTSYIEVKRGS
KIGEKSAWMLNLSIDVPKIDKGVDPSIIGGIDVGVKSPLVCAINNAFSR
YSISDNDLFHENKKMFARRRILLKKNRHKRAGHGAKNKLKPITILTEKS
ERFRKKLIERWACEIADFFIKNKVGTVQMENLESMKRKEDSYFNIRLRG
FWPYAEMQNKIEFKLKQYGIEIRKVAPNNTSKTCSKCGHLNNYFNFEYR
KKNKFPHFKCEKCNFKENADYNAALNISNPKLKSTKEEP.

[0493] In some embodiments, a tracrRNA, known as R1518 is used and is native for the system and has the sequence of:

(SEQ ID NO: 1493)
CUUCACUGAUAAAGUGGAGAACCGCUUCACCAAAAGCUGUCCCUUAGGG
GAUUAGAACUUGAGUGAAGGUGGGCUGCUUGCAUCAGCCUAAUGUCGAG
AAGUGCUUUCUUCGGAAAGUAACCCUCGAAACAAAUUCAUUU.

[0494] In some embodiments, Cas14a. 1 uses two RNA components, a tracrRNA and a crRNA. In some embodiments, the native crRNA repeat that occurs with this system is used.

[0495] In some embodiments, crRNAs used are:

R3297-SARS-CoV-2 N-gene having the sequence of:
(SEQ ID NO: 1494)
GUUGCAGAACCCGAAUAGACGAAUGAAGGAAUGCAACCCCCCAGCGCUU
CAGCGUUC;
R3298-Mammuthus-having the sequence of:
(SEQ ID NO: 1495)
GUUGCAGAACCCGAAUAGACGAAUGAAGGAAUGCAACGCCGAUAAUGAU
GUAGGGAU;
R4336-SARS-CoV-2-having the sequence of:
(SEQ ID NO: 1496)
GUUGCAGAACCCGAAUAGACGAAUGAAGGAAUGCAACUGGCACUGAGAA
UUUGACUA;
and
R4783-OC43-having the sequence of:
(SEQ ID NO: 1497)
GUUGCAGAACCCGAAUAGACGAAUGAAGGAAUGCAACUACAAGUGCCUG
UAGGUAUA.

[0496] For some embodiments, buffers that were compatible with Cas14a and low temperature RT-LAMP (LowLAMP) were identified. Results are shown in FIGS. 56A-56B. For this embodiment, LowLAMP and Cas14a were found to be optimally functional in different buffers. For this embodiment, the performance of LowLAMP at 50 C in buffers that are optimal for LowLAMP (IB1, IB13, IB14) and buffers that are optimal for Cas14a (A3, H2, TM) was evaluated as well as the performance of Cas14a in the same buffers at 50 C. Results in FIGS. 56A-56B show that both LowLAMP and Cas14a are functional in the LowLAMP optimal buffers, but Cas14a is most compatible with buffer IB14. This work enables the identification of a buffer condition that is compatible with both isothermal amplification and Cas14a DETECTR, a key step in moving towards a one-pot reaction.

[0497] In some embodiment, primers and dNTPs have the greatest inhibitory effect on Cas 14 performance as seen in the results presented in FIG. 57. Here the impact of the individual components of LowLAMP on the performance of Cas14 were tested to determine which components might be responsible for the inhibition seen when attempting one-pot reactions. Each component was added to the Cas14a reaction with 1 nM of target dsDNA and the reaction was run for 60 minutes at 50 C. The results indicate that primers and dNTPs contribute to the inhibition of LAMP.

[0498] In some embodiments, LAMP functions with lower concentrations of dNTPs and primers as shown in FIG. 58. In some embodiments, both the dNTPs and primers in LAMP have an inhibitory effect on Cas14. In this embodiment, the performance of lower concentrations of dNTPs and primers was tested to see the impact on the performance of LowLAMP using Klenow (exo-) at 50 C. For this embodiment, results show a time-to-result where a lower value indicates faster amplification. (a) Titration of dNTPs shows that LowLAMP functions down to 0.8 mM dNTPs. For this embodiment, the performance of the assay was improved at 1.2 mM and less versus the standard 1.4 mM. (b) Titration of primers in LowLAMP. The results of this assay show that going below 0.5× of primers can have an inhibitory effect. Together these results suggest that the dNTPs and primers concentrations can be reduced without negatively impacting LowLAMP performance, which may help relieve the observed inhibition of Cas14.

[0499] In some embodiments, One-pot Cas14 with LowLAMP was tested at 50 C. For such embodiments, one-pot DETECTR using Cas14 and LowLAMP at 50 C using a Klenow (exo-) DNA polymerase was shown to be functional as seen in FIGS. 59A-59B. For this embodiment, lower primer and dNTP concentrations were tested. Other embodiments have suggested that Cas 14 is inhibited at the standard 1.4 mM and 1× primer concentration. (a) Signal from Cas14a one-pot. For this embodiment, one-pot DETECTR reactions using a Cas14 were either complexed with a SARS-CoV-2 N-gene crRNA that targeted the amplicon generated by LowLAMP, or complexed with a non-target crRNA that targeted a gene in the Mammuthus primigenius mtDNA. Results from this embodiment, showed a signal only in the reaction that were run with target RNA and the crRNA targeting the amplicon. No signal was seen when there was no target present, or the Cas14 crRNA was targeting the Mammuthus gene. (b) To confirm the generation of the target of interest by LAMP, amplicons generated in the one-pot reaction were run in a Cas12 DETECTR reaction using a SARS-CoV-2 N-gene crRNA. These results demonstrated that the amplicon was generated when the target RNA was present. Furthermore, the results indicate that the one-pot reaction is functional at 0.8 and 0.6 mM dNTPS, but not at 1.4 mM dNTPs due to Cas14 inhibition at this concentration of dNTPs.

[0500] In some embodiments, Cas14 is used with a polymerase (e.g., a Bsm DNA polymerase, a Bst DNA polymerase, a Klenow (exo-) DNA polymerase, or a Bsu DNA polymerase) (55C) for the OnePot assay. The one-pot reaction may be faster if the reaction temperature is increased from 50 C to 55 C. However, the DNA polymerase used in LowLAMP is not functional at 55 C, so here Bsm DNA polymerase was used which works more robustly at 55 C than other LAMP polymerases such as Bst. Several different concentrations of dNTPs and primers were tested and performance of the assay was assessed. Results shown in FIG. 60 indicate that a signal is generated by Cas14 when Cas 14 has the crRNA that matches the target amplicon (N-gene) and when the target RNA is present in the reaction. The speed of the reaction was fastest with 1 mM dNTPs, but the overall signal was lower than when 0.8 and 0.6 mM dNTPs were used.

[0501] For some embodiments, the initial performance of the one-pot DETECTR reaction, called HotPot was evaluated. Results are shown in FIG. 61. In this experiment, a limit of detection experiment for two different DNA polymerases at 55 C was performed. Cas14 crRNAs targeting either the SARS-CoV-2 N-gene or an off-target gene were included in the experiment. The assay at 1000, 500, 250, or 125 copies/reaction of SARS-CoV-2 RNA genomes was tested. Robust performance of the assay at the lowest tested concentration of 125 copies/reaction for 3/3 replicates as shown in FIG. 61.

[0502] For some embodiments, the limit of detection experiments were performed two different DNA polymerases at 55 C. Results are shown in FIG. 62. For these embodiments, Cas14 crRNAs targeting either the SARS-CoV-2 N-gene or an off-target gene were included in the experiments and the assay at 100, 75, 50, 10, or 1 copies/reaction of SARS-CoV-2 RNA genomes were tested. For these embodiments, robust performance of the assay at 100 copies/reaction for 3/3 replicates was observed. At 75 copies and below several replicates did not show up, but detection down to 10 copies/reaction for ⅔ replicates was observed

[0503] For various embodiments described herein, the assay turn-around time is 5 minutes. In some embodiments, the assay turn-around time is 10 minutes. In some embodiments, the turn-around time is 15 minutes. In some embodiments, the turn-around time is 20 minutes. In some embodiments, the turn-around time is 30 minutes. In some embodiments, the turn-around time is 40 minutes or less.

### One-Pot NECTR: NEAR Amplification+Cas14a DETECTR in Single Reaction Volume

[0504] Described herein are various methods of sample amplification and detection in a single reaction volume. Any of the devices described herein may be configured to perform amplification and detection in a same well, chamber, channel, or volume in the device. In certain instances, methods include simultaneous amplification and detection in the same volume. In certain instances, methods include sequential amplification and detection in the same volume. In some embodiments, sample amplification may comprise NEAR amplification.

[0505] For some embodiments, replacing Bst polymerase in NEAR can enable SARS-CoV-2 detection at lower temperatures as shown in FIG. 63. In these embodiments, NEAR protocol uses Bst 2.0 to generate an amplicon from SARS-CoV-2 at 60 C. This polymerase also functions at 55 C, but at reduced capacity. The performance of Bsu and Klenow (-exo) polymerases at lower temperatures was evaluated for these embodiments. For these embodiments, it was found that Klenow (-exo) polymerase enables robust amplification at 55C and 50 C. Data shown in FIG. 63 is Cas14a DETECTR using SEQ ID NO: 3 following a NEAR amplification reaction. For some embodiments, amplification reactions were performed at the indicated temperature for 10 minutes in a buffer that was composed of a mixture of 1× IsoAmp® buffer+0.5× CutSmart® buffer (NEB). It was observed in this embodiment that Cas14a shows peak activity at 55 C and 50 C, but not at 60 C.

[0506] For some embodiments, NEAR amplification functions in Cas14a optimal buffers as shown in FIG. 64. The optimal buffer for Cas14a has less salt and higher Mg2+ than the optimal buffer for NEAR amplification. In this embodiment, the performance of NEAR amplification in two buffers for Cas14a: 1× TM Buffer and 1× H2 Buffer. In this embodiment, amplification reactions were performed with the indicated polymerase, buffer, and reaction temperature with Nt. BstNBI, Omniscript RT, M2805 FWD, M2811 REV. Data shown in FIG. 64 is the result of a Cas14a DETECTR reaction using SEQ ID NO: 3 to evaluate the amount of amplicon produced. For this embodiment, results indicate that TM Buffer and H2 Buffer may function for NEAR amplification. However, results suggest that the reactions are producing ˜10 times less amplicon than an optimal NEAR reaction. This suggests room for further buffer optimization. In some embodiments: 1× TM Buffer: 20 mM Tricine, pH 8.5; 2 mM KOAc; 100 μg/mL BSA; 15 mM MgOAc. In some embodiments: 1× H2 Buffer: 20 mM Tris-HCl, pH 8.8; 2 mM KOAc; 0.1% Tween-20; 17.5 mM MgOAc.

[0507] In some embodiments, Cas14a functions in a range of KOAc salt concentrations as shown in FIG. 65. In some embodiments, Cas14a reaction buffer (H2 Buffer) contains 2 mM KOAc. In some embodiments, amplification reactions require higher concentrations for optimal efficiency. In some embodiments, the performance of a Cas14a DETECTR reaction in increasing concentrations of KOAc. Cas14a DETECTR reaction was evaluated with tracrRNA R1518, crRNA R2424, at a target concentration of 1 nM, and a reaction temperature of 50 C. Results shown in FIG. 65 indicate that Cas14a is maximally active at 2-10 mM KOAc, but remains robustly active up to 60 mM. At 70 mM KOAc performance of Cas 14a begins to drop off. In some embodiments, 1× H2 Buffer is composed of: 20 mM Tris-HCl; pH 8.8; 2 mM KOAc; 0.1% Tween-20; and 17.5 mM MgOAc.

[0508] In some embodiments, increasing concentrations of KOAc improve NEAR performance in Cas14a optimal buffers, as seen in FIG. 66. NEAR amplification in Cas14a optimal reaction buffers was initially seen to be less efficient than when amplification is performed in the optimal NEAR buffer (1× IsoAmp®+0.5× CutSmart®). In some embodiments, the impact of increasing amounts of KOAc on the performance of NEAR amplification in the background of a Cas 14a optimal amplification buffer (H2 Buffer). As seen in FIG. 66 results show how Cas12 variant DETECTR assay using SEQ ID NO: 17 performed after NEAR amplification to measure amplification efficiency. Results indicate that increasing KOAc to up to 60 mM improves the amount of NEAR amplicon generated. From 2 mM to 60 mM KOAc are functional ranges for Cas14a. In some embodiments: 1× H2 Buffer: 20 mM Tris-HCl, pH 8.8; 2 mM KOAc; 0.1% Tween-20; 17.5 mM MgOAc. In some embodiments, increasing concentrations of KOAc improve NEAR performance in Cas14a optimal buffers as seen in FIG. 67.

[0509] Performance of Cas14a.1 crRNAs on SARS-CoV-2 E-gene amplicon are shown in FIG. 70 for some embodiments. In some embodiments, Cas14a crRNAs, designed to target the SARS-CoV-2 E-gene NEAR amplicon generated by primers M2805/M2811. Results are shown in FIGS. 68A-68B. FIG. 68A shows the position of the crRNAs. R1765 and R1764 are Cas12 variant (SEQ ID NO: 17) crRNAs that target the amplicon. PAM sequences for a Cas12 variant (SEQ ID NO: 17) are indicated, but there are no TTTR PAMs for Cas14 to use within this amplicon. FIG. 68B shows the performance of Cas14a. 1 crRNAs on NEAR amplicon (generated at 60 C for 15 minutes). All tested crRNAs worked robustly with the least amount of background from R3960, R3961, and R3962.

[0510] In some embodiments, the performance of Klenow (exo-) NEAR assay in IB13 buffer at decreasing salt concentrations was evaluated as shown in FIG. 69. In these embodiments, standard NEAR reaction buffer was composed a mixture of 1× IsoAmp® buffer (NEB) and 0.5×NEBuffer™ 3.1 (NEB), which gives a final salt concentration of 100 mM. In these embodiments, variations of the IB13 buffer with various concentrations of KOAc as the salt were tested. In these buffer variations the NEAR assay using Klenow (exo-) as the polymerase was run at 55 C for 20 minutes. To readout the amount of amplicon produced, a Cas14a DETECTR assay using SEQ ID NO: 3 on 2 μL of the NEAR amplicon was performed. The results indicate that the best NEAR performance was with 100 mM KOAc, similar to the standard NEAR reaction buffer, and that the amount of amplicon produced was reduced as the salt is reduced. The assay has acceptable performance at 80-70 mM KOAc. In some embodiments, the IB13 buffer has a composition of: 20 mM Tris-HCl, pH 8.8; 10 mM (NH4) 2SO4; 50 mM KOAc; 5 mM MgOAc; 1% Tween-20; 1 mg/mL BSA.

One-Pot sRCA: Rolling Circle Amplification with Cas14a DETECTR in Single Reaction Volume

[0511] Described herein are various methods of sample amplification and detection in a single reaction volume. Any of the devices described herein may be configured to perform amplification and detection in a same well, chamber, channel, or volume in the device. In certain instances, methods include simultaneous amplification and detection in the same volume. In certain instances, methods include sequential amplification and detection in the same volume. In some embodiments, sample amplification may comprise RCA.

[0512] FIG. 70 presents an overview of sRCA. In this system, a target nucleic acid is added to a system that contains components for a one-pot RCA+Cas protein reaction. The RCA portion of the system is composed of a dumbbell-shaped DNA template, a primer, and a DNA polymerase. For some embodiments, the DETECTR portion of the reaction is composed of a Cas protein, such as Cas12 or Cas14, a crRNA that targets the amplicon generated by RCA, but not the dumbbell-shaped DNA template, and a FQ ssDNA reporter. A target nucleic acid (e.g., viral RNA), which is capable of binding to the dumbbell DNA template, is added to the system. The target nucleic acid base pairs with the DNA template. The more extensive base pairing between the target and the DNA template causes the internal base pairing of the dumbbell to be disrupted, which opens up a binding site for the primer. The DNA polymerase can then use this primer to begin RCA. In some embodiments, As RCA proceeds, the amplicon is generated which contains the target site for the Cas protein. The Cas protein recognizes this site through base pairing with the crRNA and initiates trans-cleavage of the FQ ssDNA reporter. In some embodiments, the system contains fewer components than other one-pot approaches and does not require a RT enzyme.

[0513] In some embodiments, screening dumbbell DNA templates are screened for sRCA performance, as shown in FIG. 71. In some embodiments, four dumbbell DNA templates for RCA contain a Cas12 or Cas14 target sites. For these embodiments, a DNA binding dye, SYTO9, is used to monitor whether these dumbbells are functional in RCA at a variety of temperatures for 1 hour. Results as seen in FIG. 71 indicate that only dumbbell 4 was functional in generating DNA by RCA. The peak performance of the system was seen at 35-45 C.

[0514] For some embodiments, the performance of Cas14a to detect product of RCA reaction was monitored, as seen in FIG. 72. In other embodiments, it was shown that Dumbbell 4 was functional in RCA and that Dumbbell 1 was not functional. In some embodiments, either 2 μL or 5 μL of the RCA reactions were added to a 20 μL Cas14a DETECTR reaction that contained a crRNA that is capable of detecting the amplicon generated by RCA, but not the Dumbbell DNA template. The results indicate that Cas14a is capable of detecting the amplicon as expected, and that increased performance is seen with lower amounts of RCA added to the reaction.

[0515] In some embodiments, of the One-Pot assay sRCA, Cas14 is used. Functional results for such embodiments are shown in FIG. 73. The reaction was performed at 45 C in two conditions as two embodiments. In one embodiment, the DNA template, Dumbbell 4, does not contain a trigger oligo and in the other embodiment, the DNA template does have a trigger oligo. In the embodiment with the trigger oligo, which initiates RCA, higher signal is observed as compared to the other embodiment without the trigger oligo. This demonstrates that Cas14 is capable of detecting the RCA amplicon in a one-pot reaction, and that the sRCA reaction is controlled by the presence of the trigger oligo.

[0516] In some embodiments, a trigger oligo is titrated for a Cas14 One-Pot sRCA assay. For this embodiment, the minimal concentration of trigger oligo that is required to initiate the one-pot Cas14 sRCA reaction was determined. Results shown in FIG. 74 indicate that at least 0.5 nM of trigger oligo is required to initiate the sRCA reaction.

[0517] In some embodiments, the Cas 12 variant enzyme (SEQ ID NO: 17) is used in the one-pot sRCA assay. In other embodiments, it has been shown that Cas14 is capable of functioning in a one-pot sRCA reaction. In this embodiment, it was shown that Cas12 variant (SEQ ID NO: 17) is also capable of functioning in this assay at 45 C. The results from the cleavage of ssDNA FQ reporter included in the sRCA reaction are shown in FIG. 75. The results for such an embodiment indicate that Cas12 variant (SEQ ID NO: 17) is capable of functioning in the one-pot sRCA format. In some embodiments, the concentration of stock trigger oligo is: (1) 40 nM stock=2 nM final conc; (2) 20 μM stock=1 μM final conc.; and (3) 20 fm stock=1 fM final conc.

[0518] FIG. 76 presents an overview of RCA positive feedback for Cas13. In some embodiments, Cas13 is programmed to recognize an RNA target (g). When the viral RNA target is present, a blocking motif on the 3′ end of the primer (v) is removed. After removal of this blocking motif, the primer can then serve to open up the circular template and allow for amplification by RCA using a DNA polymerase. As the amplicon is generated the same target sequence as the original RNA (g) is generated. This ssDNA target sequence is then capable of being recognized by Cas13 which can either remove additional blocking groups from the primer (v) or cleave a FQ reporter that generates a fluorescent signal. This system forms a positive feedback loop for Cas13.

[0519] FIG. 77 presents results for the evaluation of Cas13-compatible DNA templates for RCA. In some embodiments, two dumbbell DNA templates for RCA that contain a Cas13 ssDNA targeting site. In some embodiments, a DNA binding dye, SYTO9, is used to monitor whether these two dumbbells are functional in RCA at 30 C. The performance of the two templates was monitored a titration of the primers that are used to trigger the amplification. The results indicate that Dumbbell 7, but not Dumbbell 8 is compatible with RCA as shown in FIG. 77.

[0520] In some embodiments, Cas13-compatible DNA template is used for RCA. FIG. 78 presents results for such embodiments, to determine whether Cas13-compatible DNA template is functional in RCA. In some embodiments a circular DNA dumbbell for sRCA has a Cas13 ssDNA target site, known as dumbbell 7. In some embodiments, a DNA binding dye, SYTO9, is used to monitor whether the DNA template is functional in RCA at various temperatures for two different polymerases using 2 nM of trigger oligo (the primer for sRCA). The results shown in FIG. 78 indicate that dumbbell 7 is capable of generating amplicon at temperatures from 30 to 55 C. Such an embodiment, consisting of the utilization of dumbbell 7 for generating amplicons from 30 to 55 C, enables for the use of the Cas13 enzyme in the OnePot reaction.

[0521] In some embodiments, the Cas 13M26 is used in the one-pot sRCA reaction. FIG. 79 presents results for such an embodiment, where the amplicon generated by RCA contains a ssDNA region that is capable of being recognized by a Cas13 gRNA. As the reaction proceeds, additional ssDNA target is produced, while the activated the Cas13M26 cleaves a FQ RNA reporter to generate a signal. The performance of this reaction at a variety of temperatures was evaluated and it was shown that Cas13M26 is capable of detecting this ssDNA region of the RCA amplicon from 30-40 C, which aligns with the previously established active temperatures for Cas13M26. The performance of two different polymerases at the temperatures of interest was also compared. The results shown in FIG. 79 suggest that Cas13 can be used in a one-pot reaction where RCA is the amplification method, and that Cas13's ability to detect ssDNA is preserved in this embodiment.

CasPin: Cas13 Positive-Feedback Loop Leveraging Cas13 ssDNA Targeting

[0522] Described herein are various methods of signal amplification. Any of the devices described herein may be configured to perform signal amplification after the reporter has been cleaved by the programmable nuclease. Signal amplification may improve detection of rare targets in a complex sample. In certain instances, methods include leveraging ssDNA targeting of the programmable nuclease (e.g., Cas13) to create a positive feedback loop upon biding of the programmable nuclease to the target nucleic acid to cleave additional reporters and amplify the signal generated by the presence of the target nucleic acid.

[0523] FIG. 80 presents an overview of CasPin. In some embodiments, the CasPin system uses two populations of Cas13. One is programmed with a crRNA that targets an RNA of interest, such as a viral genome. The other population is programmed with a crRNA that is optimal for ssDNA detection. In some embodiments, the systems also contains a hairpin-shaped oligo that is composed of both DNA and RNA. Finally, in some embodiments, there is a FQ RNA reporter that is used to readout the result of the assay. When Cas13 detects the RNA of interest, it can either cleave the FQ RNA reporter or the RNA on the hairpin oligo. When the RNA on the hairpin oligo is cleaved, it dissociates from the DNA revealing a ssDNA target site that can be recognized by the other population of Cas13 RNPs. This initiates a positive feedback loop where Cas13 recognizes the ssDNA target and cleaves more hairpin molecules, which increases the overall amount of target in the system, and leads to further activation of the system. As this process continues more and more FQ RNA reporter is cleaved, which is the ultimate readout of the assay.

[0524] FIG. 81 presents potential structures of hairpins for CasPin. In some embodiments, the target ssDNA sequence is indicated by the purple rectangle. RNA loop structures could occur on either side of the target strand (either 5′,3′ or both). The strand that is complementary to the target site could be DNA or RNA. The strand that is complementary to the target site could also be a perfect match to the target site, be shorter than the target site, or contain mismatches to help destabilize or promote trans-cleavage by Cas13.

[0525] In some embodiments, two hairpins are used on either end of the target site. FIG. 82 presents results for such an embodiment and indicates capability for blocking Cas13 from recognizing the ssDNA target site. In some embodiments, CasPin oligos have varying lengths of hairpin stems. In some embodiments, CasPin oligo do not have stem structures. In some embodiments, CasPin oligos contain another DNA sequence. Such embodiments were evaluated and found to not be recognized by the crRNA. Both raw oligos from the manufacture and those that had been denatured and refolded at 25 C in a Cas13 DETECTR reaction were tested. The results of this experiment, shown in FIG. 84, demonstrate that Cas13 was able to recognize the target site regardless of the stem length. In some embodiments, longer stem length oligos block Cas13 recognition without RNA cleavage to release the structure. One-pot DETECTR on handheld microfluidic device

[0526] Described herein are various devices and methods for running one-pot DETECTR assays on a handheld device. Any of the devices described herein may be configured to perform a one-pot DETECTR assay. For example, the device shown in FIGS. 10A-12 may be configured to run a one-pot DETECTR assay. Results for such an embodiment are shown in FIG. 106. The y-axis displays raw fluorescence (AU) and the x-axis shows time in minutes. The three traces show the same data collected at three different acquisition settings. The line trace represented by squares, a low cycle corrected average, shows a setting that did not saturate the detector and thus shows the full dynamic range of the signal throughout the assay.

### Multiplexed DETECTR Assay-Based Lateral Flow Assay

[0527] Described herein are various methods of multiplexing detection. Any of the devices described herein may be configured for multiplexing (e.g., detecting multiple target nucleic acids). In certain instances, multiplexed detection may utilize one or more lateral flow assay strips.

[0528] Described here are various devices and methods for a DETECTR™ assay based multiplex lateral flow strip as illustrated in FIG. 107. In some embodiments, reporters (10701) are immobilized to a surface (10700) of a solid support. In some embodiments, programmable nuclease (e.g., Cas-complex) probes (10707) are immobilized to a surface (10700). In some embodiments, programmable nuclease probes (10707) comprise guide nucleic acid such as a single guide RNA (sgRNA) (10708). In some embodiments, a programmable nuclease probe (10707) may comprise a sgRNA (10708) that is designed to be a compliment for a target nucleic acid of a sample. In some embodiments, programmable nuclease probes (10707) and reporters (10701) are both immobilized to a surface (10700). In some embodiments, programmable nuclease probes (10707) and reporters (10701) are both immobilized to a surface (10700) in close enough proximity that the reporter (10701) can be cleaved by the programmable nuclease of the programmable nuclease probe (10707). In some embodiments, programmable nuclease probes (10707) and reporters (10701) are both immobilized to a surface (10700) in close enough proximity that the reporter (10701) can be cleaved (10709) by the programmable nuclease of the programmable nuclease probe (10707) upon binding of a target nucleic acid to an sgRNA (10708) of the programmable nuclease probe (10707) when target nucleic acid and sgRNA (10708) are compliments. In such an embodiment, this indicates the presence of and is a “hit” for the target. In some embodiments, binding of a target nucleic acid that is complimentary to a sgRNA (10708) of the programmable nuclease probe (10707) results in the programmable nuclease of the programmable nuclease probe (10707) initiating cleavage of nucleic acids within a close enough proximity of the programmable nuclease. In some embodiments, the surface (10700) is in the bottom of a well. In some embodiments, a collection of a first programmable nuclease probe (10707) and a first reporter (10701) are immobilized to a surface at one location of the surface (10700).

[0529] In some embodiments, as illustrated in FIG. 107A, the reporter (10701) may comprise a surface linker (10702), a nucleic acid (10703), a second linker (10706), a detection moiety (e.g., a label) (10704), and an affinity molecule (e.g., a binding moiety) (10705). In some embodiments, the binding moiety (10705) is biotin. In some embodiments, there is more than one copy of the same reporter (10701) immobilized to the surface.

[0530] In some embodiments, lateral flow assay strips (10710) are used to detect cleaved reporters (10709). In some embodiments, cleaved reporters (10709) are contacted to the sample pad (10711) of the lateral flow strip (10710). In some embodiments, the cleaved reporters (10709) bind to conjugate particles present in the sample pad. In some embodiments, the conjugate particles are gold nanoparticles. In some embodiments, the gold nanoparticles are functionalized with anti-biotin. In some embodiments, the anti-biotin functionalized gold nanoparticles bind to the cleaved reporter which contains one or more biotins in the binding moiety (10705).

[0531] In some embodiments, the reporter contains a second linker. In some embodiments, the second linker links one or more binding moieties to the nucleic acid. In some embodiments, the second linker links one or more labels to the nucleic acid. In some embodiments, the second linker links both one or more binding moieties and one or more labels to the nucleic acid of the reporter. In some embodiments, the reporter is a dendrimer or trebler molecule.

[0532] In some embodiments, the reporter contains a label. In some embodiments, label is FITC, DIG, TAMRA, Cy5, AF594, Cy3, or any appropriate label for a lateral flow assay.

[0533] In some embodiments, the reporter may comprise chemical functional group for binding. In some embodiments, the chemical functional group is biotin. In some embodiments, the chemical functional group is complimentary to a capture probe on the flowing capture probe (e.g., conjugate particle or capture molecule). In some embodiments, the flowing capture probe is a gold nanoparticle functionalized with anti-biotin. In some embodiments, the flow capture probe is located in the sample pad. In some embodiments, the flowing capture probe is located in a conjugate pad in contact with the sample pad, wherein both lateral flow assay strip may comprise both the sample pad and conjugate pad, further wherein both the sample pad and the conjugate pad are in fluid communication with the detection region.

[0534] In some embodiments, the lateral flow assay strip (10710) contains a detection region (10712). In some embodiments, the detection region (10712) may comprise one or more detection spots. In some embodiments, the detection spots contain a stationary capture probe (e.g., capture molecule). In some embodiments, the stationary capture probe may comprise one or more capture antibodies. In some embodiments, the capture antibodies are anti-FITC, anti-DIG, anti-TAMRA, anti-Cy5, anti-AF594, or any other appropriate capture antibody capable of binding the detection moiety or conjugate.

[0535] In some embodiments, the flowing capture probe comprising FITC is captured by a stationary capture probe comprising anti-FITC antibody. In some embodiments, the flowing capture probe comprising TAMRA is captured by a stationary capture probe comprising anti-TAMRA antibody. In some embodiments, the flowing capture probe comprising DIG is captured by the stationary capture probe comprising anti-DIG antibody. In some embodiments, the flowing capture probe comprising Cy5 is captured by the stationary capture probe comprising anti-Cy5 antibody. In some embodiments, the flowing capture probe comprising AF574 is captured by the stationary capture probe comprising anti-AF594 antibody.

[0536] In some embodiments, the lateral flow assay strip (10710) may comprise a control line (10714). In some embodiments, the control line (10714) may comprise anti-IgG that is complimentary to all flowing capture probes. In some embodiments, when a flowing capture probe does not bind to a reporter the flowing capture probe will be captured by the anti-IgG on the control line, ensuring the user that the device is working properly even no signal is read from the test line.

[0537] In some embodiments, the lateral flow assay strip (10710) may comprise a sample pad. In some embodiments, the flowing capture probe may comprise anti-biotin. In some embodiments, the flowing capture probe may comprise HRP. In some embodiments, the flowing capture probe may comprise HRP-anti-biotin. In some embodiments, the flowing capture probe is HRP-anti-biotin DAB/TMB.

[0538] Described here are various devices and methods for a DETECTR™ assay based multiplex lateral flow strip as illustrated in FIG. 108. FIG. 108 depicts a non-limiting exemplary workflow for a DETECTR™ assay read out on a lateral flow assay strip. In some embodiments, a sample (10801) contains one or more target nucleic acid sequences. In some embodiments, a sample (10801) (e.g., a sample solution) contains at least first and second target nucleic acid sequences. In some embodiments, the sample (10801) is introduced into a well (10802) (e.g., D1-D5) where at one or more locations there are different guide nucleic acids such as sgRNAs immobilized to the surface of the well. In some embodiments, the sgRNAs are part of a programmable nuclease probe immobilized to a surface. In some embodiments, a sgRNA is designed to specifically bind to a target nucleic acid in the sample. In some embodiments, there are different sgRNAs corresponding to different locations (e.g., locations D1-D5) on the surface of the well, where each different sgRNA is complimentary for a different target nucleic acid sequence that may or may not be present in the sample. In some embodiments, in addition to the programmable nuclease probes containing sgRNAs, each location is functionalized with one or more reporter probes having distinct functional groups. In some embodiments, the reporter probes are in close enough proximity to be cleaved by the programmable nuclease probes. In some embodiments, as described in example 13, binding between a particular sgRNA and the target nucleic acid to which the sgRNA is designed to specifically bind allows for a section of one or more reporters are cleaved from a corresponding nucleic acid and released into the sample solution. In some embodiments, the reporter is functionalized with a label. In some embodiments, the lateral flow assay strip contains a detection region comprising detection spots (e.g., 10803, 10804), where each detection spot contains a different type of capture antibody. In some embodiments, each capture antibody type specifically binds to a particular label type of a reporter. In some embodiments, a first detection spot (10803) contains the capture antibody anti-FITC. In some embodiments, location D5 on the surface of the well (10802) contains a first immobilized programmable nuclease probe including the sgRNA specific to the first target nucleic acid sequence. In some embodiments, D5 additionally contains the immobilized first reporter (10806), which is labeled with FITC. In some embodiments, upon binding of the first target nucleic acid sequence to the programmable nuclease probe causes the cleavable nucleic acid of the first reporter (10806) to be cleaved and released into solution. Alternatively, or in combination, in some embodiments, a second detection spot (10804) contains the capture antibody anti-DIG. In some embodiments, a second location D4 contains the immobilized programmable nuclease probe including the sgRNA specific to the second target nucleic acid sequence. In some embodiments, D4 additionally contains the immobilized second reporter (10805), which is labeled with DIG. Therefore, in some embodiments, upon binding of the second target nucleic acid sequence, the immobilized second reporter (10805) is cleaved and released into solution. In some embodiments, the solution containing cleaved first and second reporters (10805) and (10806) is contacted to the sample pad of the lateral flow assay strip along with chase buffer. In some embodiments, the sample pad has one or more flowing capture probes (e.g., anti-biotin-AuNP) disposed thereon. In some embodiments, the sample solution containing the cleaved first and second reporters, along with the chase buffer, flow across the sample pad, where the reporters are bound to conjugates (e.g., anti-biotin-gold nanoparticles). In some embodiments, the solution containing the cleaved reporters is contacted to the sample pad by manually pipetting. In some embodiments, the solution containing the cleaved reporters is contacted to the sample pad being drawn from a chamber in fluid connection with the sample pad. In some embodiments, the solution containing the cleaved reporters is contacted to the sample pad by being drawn from a chamber in which the assay resulting in the cleaved reporter solution occurs. In some embodiments, the reporters are cleaved in the sample pad. In some embodiments, the reporters are cleaved in the sample pad by a DETECTR™ assay. In some embodiments, the solution is drawn into and out of the sample pad by capillary action, or wicking. In some embodiments, the capillary action or wicking is caused by the liquid being drawn into an absorption pad. In some embodiments, the capillary action or wicking is caused by the liquid being drawn into an absorption pad, not requiring electrical power. In some cases, the solution is drawn into or out of the sample pad by a pressure gradient. In some embodiments, the gold nanoparticle-reporter conjugates having reporter (10806) labeled with FITC will selectively bind to the first detection spot (10803) containing the capture antibody anti-FITC, thus indicating the presence of the first target nucleic acid sequence in the sample. In some embodiments, the AuNP-reporter conjugates having mostly reporter (10805) labeled with DIG will selectively bind to the second detection spot (10804) containing the capture antibody anti-DIG, thus indicating the presence of the second target nucleic acid sequence in the sample. In this manner, for some embodiments, parallel detection of two or more target nucleic acid sequences present in a multiplexed sample is enabled.

[0539] Described herein are various embodiments of lateral flow-based detection as illustrated in FIG. 109. In some embodiments, horse radish peroxidase (HRP) (10901) is used to enhance detection in lateral flow based DETECTR™ assays. In some embodiments, a sample containing a target(s) nucleic acid sequence is exposed to a surface (10900) upon which programmable nuclease probes and reporter probes are immobilized on the surface. In some embodiments, the reporter probes contain HRP molecules. In some embodiments, upon cleavage of the reporter by the programmable nuclease following a specific binding event between the target and the guide RNA, the cleaved portion of the reporter is released into the sample solution (10906). In some embodiments, the sample solution is then exposed to a lateral flow assay strip (10902) comprising or adjacent to a sample pad containing sodium percarbonate (10904), which generates H₂O₂ when exposed to an aqueous solution. In some embodiments, the rehydration of the sodium percarbonate to form H₂O₂ occurs when the sample is wicked through the region. In some embodiments, the substrate contains DAB, TMB, or any other sufficient substrate. In some embodiments, the “spot” changes from blue to red, indicating the presence of HRP, and in turn a “hit” for the target nucleic acid sequence. In some embodiments, the readout is accomplished in solution, upon a color change of the sample solution (10908).

[0540] Described here are various methods and devices utilizing HRP-enhanced multiplexed DETECTR™ assays utilizing lateral flow assay strips for readout. In some embodiments, an HRP-signal enhanced multiplexed lateral flow assay as illustrated in FIG. 110. In some embodiments, the immobilized surface (11000) of a support medium and detection on the lateral flow assay strip (11010) are carried out as described in FIGS. 107A-110 with the exception that signal enhancement is not carried out by gold nanoparticles scattering light. Instead, in some embodiments, the anti-biotin labeled AuNP are supplanted by HRP-anti-biotin DAB/TMB. In some embodiments, the HRP is activated by sodium percarbonate present in the lateral flow assay strip which is rehydrated by the reaction and or chase buffer. In some embodiments, HRP allows for strong enough signal so as not to require sample amplification such as PCR.

[0541] Described herein are various embodiments for multiplexed target nucleic acid detection utilizing Cas13 RNA cleaving specificity over DNA, HRP-signal enhancement, and capture oligo probe specificity. In some embodiments, as shown in FIG. 111, the sample (11100) contains different target nucleic acids. In some embodiments, the sample (11100) is then contacted to the surface of the well (11101) that is functionalized at one or more locations (e.g., five locations, D1-D5). In some embodiments, there are one or more locations. In some embodiments, Cas13 enzyme is present in the programmable nuclease probe. In some embodiments, Cas13 cleaves RNA but not DNA, enabling the use of a reporter (11102) that contains nucleic acid sequences with both DNA and RNA strands. In some embodiments, upon binding of the target nucleic acid to the sgRNA, the RNA of the reporter is cleaved by the Cas13 enzyme and a fragment containing a portion of the RNA, the complete DNA sequence, and a (FITC label is released into solution. In some embodiments, this action is repeated in parallel at each location, or spot with different reporters. In some embodiments, this action is repeated in parallel at locations D1 through D5 for five different target nucleic acids, producing five distinct reporter fragments. In some embodiments, the solution is then contacted to the sample pad of the lateral flow assay strip, where the sample pad contains HRP-anti-FITC. In some embodiments, the FITC-labeled reporter fragment then binds to the HRP-anti-FITC, forming a complex (11103) and is carried downstream across the detection region, binding specifically to the detection spot containing a capture oligo that has been designed to be the compliment for the oligo in the complex (11103).

[0542] FIG. 112 shows results for both DNAse and DETECTR based assays for two replicate runs performed a week apart.

### Guide RNA Pooling for Signal Enhancement

[0543] In some embodiments, one or more programmable nuclease probes (11300-11302) are used for guide pooling to achieve enhanced signal detection in lateral flow assays as shown in FIG. 113A. In some embodiments, a first programmable nuclease probe (11300) may comprise a first sgRNA that is complimentary for a first segment of a target nucleic acid. In some embodiments, a second programmable nuclease probe (11301) may comprise a second sgRNA that is complimentary for a second segment of a same target nucleic acid. In some embodiments, a third programmable nuclease probes (11302) may comprise a third sgRNA that is complimentary for a third segment of the same target nucleic acid. In some embodiments, the first programmable nuclease probe, the second programmable nuclease probe, and the third programmable nuclease probe are all located close enough to allow for sufficient cleaving of a reporter that is labeled to indicate the presence of the target nucleic acid. FIG. 113B shows a typical lateral flow assay strip comprising a sample pad (11303), a test line (11304), and a control line (11305).

[0544] Described herein are various embodiments of guide pooling to achieve enhanced signal detection in lateral flow assays. For some embodiments as described herein, guide pooling shows enhanced Cas12a activity. FIG. 114 (described in Example 20) depicts results of a DETECTR™ assay showing enhanced Cas12a-based detection of the GF184 target using a pooled-guide (pooled-gRNA) format compared to DETECTR™ Cas12a-based assay using an individual gRNA format. In FIG. 114 the y-axis, labeled “Red” displays units of intensity and the x-axis shows the chamber number wherein a different DETECTR™ reaction occurred. FIG. 115 (described in Example 20) depicts results of a DETECTR™ assay showing enhanced sensitivity of the Cas13a-based detection of the SC2 target using a pooled-guide format compared to the Cas13a-based assays using an individual guide format.

[0545] FIG. 116 (described in Example 20) shows images corresponding to each chamber, used to count the number of positive droplets, showing that the Cas13a-DETECTR™ assay samples containing the pooled guide RNAs generated more crystals containing the amplified products per starting copy of the target RNA than the Cas13a-DETECTR™ assay samples containing the guide RNAs in individual format.

[0546] FIG. 117 (described in Example 20) shows that measurement of signal intensity following amplification showed that the Cas13a-DETECTR™ assay samples containing the pooled guide RNAs generated more signal intensity per starting copy of the target template RNA than the Cas13a-DETECTR™ assay samples containing the guide RNAs in individual format. FIG. 118 (described in Example 20) shows that measurement of signal intensity following amplification showed that the Cas13a-DETECTR™ assay samples containing the pooled guide RNAs generated more signal intensity per starting copy of the target template RNA than the Cas13a-DETECTR™ assay samples containing the guide RNAs in individual format. FIG. 118 also shows that relative quantification performed by counting the number of positive droplets showed that the Cas13a-DETECTR™ assay samples containing the pooled guide RNAs generated more crystals containing the amplified products per starting copy of the target template RNA than the Cas13a-DETECTR™ assay samples containing the guide RNAs in individual format.

[0547] FIG. 119 (described in Example 20) shows that Cas13a DETECTR™ assay samples containing the pooled guides (R4637, R4638, R4667, R4676, R4684, R4689, R4691) did not exhibit higher target detection sensitivity per starting copy of the target than the Cas13a DETECTR™ samples containing the single guides R4684, R4667, or R4785 (RNAseP guide) in individual format.

### DETECTR Based Multiplexed Lateral Flow PON Device

[0548] Described herein are various methods and devices for a programmable nuclease (e.g., DETECTR) assay based multiplex lateral flow assay as illustrated in FIG. 120. FIG. 120 depicts a non-limiting exemplary handheld device for performing a multiplexed programmable nuclease (e.g., DETECTR) assay. In some embodiments, a sample contains one or more target nucleic acid sequences. In some embodiments, the sample is introduced into a sample input (12001) (also referred to herein as a sample interface) and loaded into one or more zones (e.g., heating regions or reaction chambers, 12003) comprising one or more dried or lyophilized programmable nuclease reagents (e.g., immobilized to a glass bead). In some embodiments, the sample interface may be configured to concentrate, filter, lyse, or otherwise prepare the sample as described herein. In some embodiments, negative pressure is applied to a negative pressure port (12006) by a negative pressure source (e.g., a syringe, 12007) in order to load the DETECTR zones with the sample. In some embodiments, the sample is a lysis sample. In some embodiments, a plurality of DETECTR zones (12003) are coupled to one another along a serpentine fluid path (12004). In some embodiments, the fluid path may be spiral as described herein. In some embodiments, amplification of one or more target nucleic acids is performed in an amplification region comprising the one or more DETECTR zones (12003). The amplification region (12004) may be heated (e.g., to 55 C for 20 minutes or less) to amplify the one or more target nucleic acids as described herein. In some embodiments, the amplification region (12004) may comprise interspersed polymers. Heating can include liquid-phase chemical heating, solid phase chemical heating, and electric heating (including, but not limited to, resistance/Joule heating, induction heating, Peltier heat pumping, etc.). In some embodiments, the device includes multiple lateral flow strips (12005). In some embodiments, a diluent is introduced into a diluent input (12002). Those skilled in the art will understand that the detection region (e.g., lateral flow assay region (12005)) may include any compatible assay or a lateral flow strip as described herein.

[0549] In some embodiments, the amplification region (12004) may be coated. In some embodiments, a coating may be a hydrophilic coating, a hydrophobic coating, an inorganic coating, or an organic coating. In some embodiments, a coating may comprise a polymer coating. In some embodiments, a coating may comprise a polyethylene glycol coating. In some embodiments, a coating may comprise a streptavidin coating. In some embodiments, the interspersed polymers may be a crowding agent. In some embodiments, the crowding agent may comprise polyethylene glycol.

[0550] In some embodiments, the one or more reaction or heating zones may comprise guide nucleic acids (e.g, sgRNAs) immobilized to a surface (e.g., a glass bead disposed within a DETECTR zone). In some embodiments, the guide nucleic acids are part of a programmable nuclease (e.g., Cas-complex) probe immobilized to a surface. In some embodiments, a guide nucleic acid is designed to specifically bind to a target nucleic acid in the sample. In some embodiments, there are different guide nucleic acids corresponding to different locations on the surface and/or different surfaces in the one or more zones, where each different guide nucleic acid is complimentary for a different target nucleic acid sequence that may or may not be present in the sample. In some embodiments, in addition to the programmable nuclease probes containing guide nucleic acids, each surface location is functionalized with one or more reporters having distinct functional groups. In some embodiments, the reporters may be in close enough proximity to be cleaved by the programmable nuclease probes. In some embodiments, as described in example 13, reporters are cleaved and released into the solution upon binding between a particular guide nucleic acid and the target nucleic acid to which the guide nucleic acid is designed to specifically bind. In some embodiments, reporters are functionalized with a detection moiety (e.g., a label).

[0551] In some embodiments, chemical heating may be used. In some embodiments, chemical heating may be used to supply energy to initiate and run reactions. In some embodiments, chemical heating may be used to supply energy to initiate and run programmable nuclease assay reactions. In some embodiments, chemical heating may be used to heat reaction or heating zones. In some embodiments, chemical heating may be used to heat regions, chambers, volumes, zones, surfaces, or areas of a device.

[0552] In some embodiments, the device may comprise one or more lateral flow assay strips in a detection region disposed downstream of the amplification region. Each lateral flow assay strip contains one or more detection regions or spots, where each detection region or spot contains a different type of capture antibody. In some embodiments, each lateral flow assay strip contains a different type of capture antibody. In some embodiments, each capture antibody type specifically binds to a particular label type of a reporter. In some embodiments, a first lateral flow assay strip contains the capture antibody anti-FITC. In some embodiments, a first DETECTR region or surface location (e.g., within a reaction chamber or heating region) contains the immobilized programmable nuclease (e.g., Cas-complex) including the guide nucleic acid (e.g., sgRNA) specific to the first target nucleic acid sequence. In some embodiments, the first DETECTR region or surface location additionally contains a first immobilized reporter which is labeled with a first detection moiety (e.g., FITC). In some embodiments, upon binding of the first target nucleic acid sequence, the first immobilized reporter is cleaved and released into solution. In some embodiments, the first detection moiety is released into solution and the remainder of the first reporter remains immobilized on the surface. Alternatively, or in combination, in some embodiments, a second lateral flow assay strip contains the capture antibody anti-DIG. In some embodiments, a second DETECTR region or surface location (e.g., within a reaction chamber or heating region) contains the immobilized programmable nuclease (e.g., Cas complex) including the guide nucleic acid (e.g., sgRNA) specific to the second target nucleic acid sequence. In some embodiments, the second DETECTR region or surface location additionally contains a second immobilized reporter which is labeled with a second detection moiety (e.g., DIG). Therefore, in some embodiments, upon binding of the second target nucleic acid sequence, the second immobilized reporter is cleaved and released into solution. In some embodiments, the second detection moiety is released into solution and the remainder of the second reporter remains immobilized on the surface.

[0553] In some embodiments, the solution containing the first and second cleaved reporters is transferred from the amplification region to the lateral flow region comprising the first lateral flow assay strip and the second lateral flow assay strip. In some embodiments, a chase buffer or diluent is introduced into a diluent input and negative pressure is applied to the negative pressure port to contact the solution containing the first and second cleaved reporters to the lateral flow assay strips of the lateral flow region, where the reporters are bound to conjugate molecules e.g., anti-biotin-AuNPs. In some embodiments, the AuNP-reporter conjugates having the first reporter labeled with the first detection moiety (e.g., FITC) will selectively bind to a first detection region or spot containing the first capture antibody (e.g., anti-FITC) on the first lateral flow assay strip, thus indicating the presence of the first target nucleic acid sequence in the sample. In some embodiments, the AuNP-reporter conjugates having mostly the second reporter labeled with the second detection moiety (e.g., DIG) will selectively bind to a second detection region or spot containing the second capture antibody (e.g., anti-DIG) on the second lateral flow assay strip, thus indicating the presence of the second target nucleic acid sequence in the sample. In this manner, for some embodiments, parallel detection of two or more target nucleic acid sequences present in a multiplexed sample is enabled.

[0554] In some embodiments, the amplification region is configured to hold about 200 μL of liquid (e.g., sample solution and reagent(s)). In some embodiments, each lateral flow assay strip is configured to hold about 80 μL of liquid (e.g., sample solution and/or chase buffer). In some embodiments, the device may comprise more than one lateral flow assay strip. For example, the device may comprise two, three, four, five, six, seven, eight, nine, ten, or more lateral flow assay strips. In some embodiments, one or more lateral flow assay strips are configured to detect a control sequence instead of or in addition to a target sequence. For example, a device comprising six lateral flow assay strips may comprise five lateral flow assay strips configured to detect one or more target sequences (e.g., five different target sequences) and one lateral flow assay strip configured to detect a control sequence.

[0555] Described herein are various methods and devices for a programmable nuclease assay based multiplex lateral flow assay as illustrated in FIGS. 121A-121B. FIGS. 121A-121B illustrate a non-limiting example of a point of care device for parallel detection of two or more target nucleic acid sequences. In some embodiments, a sample contains one or more target nucleic acid sequences. In some embodiments, the sample is introduced into a sample input chamber (12101) (also referred to herein as a sample interface). The sample input chamber (12101) may be configured to receive a swab comprising the sample. In some embodiments, the sample input chamber (12101) may comprise a solution/buffer (e.g., lysis buffer) to retrieve the sample from the swab. In some embodiments, the sample interface may be configured to concentrate, filter, lyse, or otherwise prepare the sample as described herein. In some embodiments, positive pressure is applied to the sample input chamber (12101) to move the sample solution from the sample input chamber (12101) to a reaction chamber (12108) (e.g., within a heating region) containing one or more dried or lyophilized programmable nuclease (e.g., DETECTR) reagents (12109) (e.g., immobilized to a glass bead) as described herein. In some embodiments, positive pressure may be applied by a positive pressure source (e.g., a compressed gas tank, 12103) in order to load the reaction chamber with the sample solution. In some embodiments, pressure is regulated by a pressure valve (12104) coupled to the positive pressure source (12103). In some embodiments, application of positive pressure (e.g., by operating an actuator to pierce a positive pressure source 12103 comprising a compressed gas tank) moves the sample solution and dried or lyophilized reagent(s) (12109) into a serpentine amplification region of the reaction chamber (12108). In some embodiments, the amplification region may be spiral as described herein. In some embodiments, amplification of one or more target nucleic acids is performed in the amplification region (12108). The amplification region (12108) may be heated (e.g., to 55 C for 20 minutes or less) to amplify the one or more target nucleic acids as described herein. In some embodiments, application of sufficient positive pressure opens the pressure valve (12105) between the amplification region and the detection region, e.g., a lateral flow assay region (12106). In some embodiments, the valve (12105) between the amplification region (12108) and the lateral flow assay region (12106) comprising lateral flow strips (12107) may be opened by pressing a button connected to the valve (12105). Heating can include liquid-phase chemical heating, solid phase chemical heating, and electric heating (including, but not limited to, resistance/Joule heating, induction heating, Peltier heat pumping, etc.). In some embodiments, a diluent or chase buffer may be introduced to the system via the diluent input (12102). In some embodiments, opening the valve (12105) between the amplification region (12108) and the lateral flow assay region (12106) transfers the sample from the amplification region (12108) to the lateral flow assay region (12106). In some embodiments, the sample is mixed with diluent as it moves from the amplification region (12108) to the lateral flow assay region (12106). In some embodiments, the chase buffer pushes the sample from the amplification region (12108) to the lateral flow assay region (12106) without significantly diluting the sample.

[0556] In some embodiments, the one or more programmable nuclease reagent(s) comprise guide nucleic acids immobilized to a surface (e.g., a glass bead). In some embodiments, the guide nucleic acids are part of a programmable nuclease (e.g., Cas-complex) probe immobilized to a surface. In some embodiments, a guide nucleic acid may be designed to specifically bind to a target nucleic acid in the sample. In some embodiments, there are different guide nucleic acids corresponding to different locations on the surface and/or different surfaces in the one or more zones, where each different guide nucleic acid is complimentary for a different target nucleic acid sequence that may or may not be present in the sample. In some embodiments, in addition to the programmable nuclease probes containing guide nucleic acids, each surface location may be functionalized with one or more reporters having distinct functional groups. In some embodiments, the reporters are in close enough proximity to be cleaved by the programmable nuclease probes. In some embodiments, as described in example 13, reporters are cleaved and released into the solution upon binding between a particular sgRNA and the target nucleic acid to which the guide nucleic acid is designed to specifically bind. In some embodiments, reporters are functionalized with a detection moiety (e.g., a label).

[0557] In some embodiments, the device may comprise one or more lateral flow assay strips in a detection region disposed downstream of the amplification region. Each lateral flow assay strip contains one or more detection regions or spots, where each detection region or spot contains a different type of capture antibody. In some embodiments, each lateral flow assay strip may contain a different type of capture antibody. In some embodiments, each capture antibody type specifically binds to a particular label type of a reporter. In some embodiments, a first lateral flow assay strip contains a first capture antibody (e.g., anti-FITC). In some embodiments, a first surface (e.g., bead) contains the immobilized programmable nuclease (e.g., Cas-complex) including the guide nucleic acid (e.g., sgRNA) specific to the first target nucleic acid sequence. In some embodiments, the first surface additionally contains a first immobilized reporter which is labeled with a first detection moiety (e.g., FITC). In some embodiments, upon binding of the first target nucleic acid sequence, the first immobilized reporter is cleaved and released into solution as described herein. Alternatively, or in combination, in some embodiments, a second lateral flow assay strip contains a second capture antibody (e.g., anti-DIG). In some embodiments, a second surface (e.g., bead) contains the second immobilized programmable nuclease including the guide nucleic acid specific to the second target nucleic acid sequence. In some embodiments, the second surface additionally contains a second immobilized reporter which is labeled with a second detection moiety (e.g., DIG). Therefore, in some embodiments, upon binding of the second target nucleic acid sequence, the second immobilized reporter is cleaved and released into solution.

[0558] In some embodiments, the solution containing the first and second cleaved reporters is transferred from the amplification region to the lateral flow region comprising the first lateral flow assay strip and the second lateral flow assay strip. In some embodiments, a chase buffer or diluent is introduced into a diluent input or reservoir and negative pressure is applied to the negative pressure port to contact lateral flow region. A pressure valve may be disposed between the amplification region and the lateral flow region in order to regulate flow of the sample solution from the amplification region to the lateral flow region before amplification has occurred. Actuation of the pressure valve enables the solution containing the first and second cleaved reporters to contact the lateral flow assay strips of the lateral flow region, where the reporters are bound to conjugate molecules, e.g., anti-biotin-AuNPs. In some embodiments, the AuNP-reporter conjugates having the first reporter labeled with the first detection moiety (e.g., FITC) will selectively bind to a first detection region or spot containing a first capture antibody (e.g., anti-FITC) on the first lateral flow assay strip, thus indicating the presence of the first target nucleic acid sequence in the sample. In some embodiments, the AuNP-reporter conjugates having mostly the second reporter labeled with the second detection moiety (e.g., DIG) will selectively bind to a second detection region or spot containing a second capture antibody (e.g., anti-DIG) on the second lateral flow assay strip, thus indicating the presence of the second target nucleic acid sequence in the sample. In this manner, for some embodiments, parallel detection of two or more target nucleic acid sequences present in a multiplexed sample is enabled.

[0559] In some embodiments, the amplification region is configured to hold about 200 μL of liquid (e.g., sample solution and reagent(s)). In some embodiments, each lateral flow assay strip is configured to hold about 80 μL of liquid (e.g., sample solution and/or chase buffer). In some embodiments, the device may comprise more than one lateral flow assay strip. For example, the device may comprise two, three, four, five, six, seven, eight, nine, ten, or more lateral flow assay strips. In some embodiments, one or more lateral flow assay strips are configured to detect a control sequence instead of or in addition to a target sequence. For example, a device comprising six lateral flow assay strips may comprise five lateral flow assay strips configured to detect one or more target sequences (e.g., five different target sequences) and one lateral flow assay strip configured to detect a control sequence.

[0560] Described herein are various methods and devices for a DETECTR assay based multiplex lateral flow assay as illustrated in FIG. 122. FIG. 122 illustrates an embodiment of a point of care device comprising a lateral flow assay which is substantially similar to the embodiment of FIG. 120 but utilizes positive pressure to drive fluid flow instead of negative pressure. In some embodiments, the device may comprise an input port (12201) that receives a sample. In some embodiments, the input port may be configured to interface with a luer lock syringe containing the sample (e.g., containing a sample solution and/or a swab disposed therein). In some embodiments, the input port (12201) may comprise a ball check valve (12202) configured to seal the input port (12201) until a sample is received. In some embodiments, the device may comprise lyophilized reagents (12203). In some embodiments, the lyophilized reagents (12203) may be stored in the sealed sample interface chamber before the sample is received. In some embodiments, the device may comprise hydrophobic filters that are permeable to gases (12204 and 12207) and configured to permit liquid movement through the device and facilitate release of displaced gases therefrom. In some embodiments, the device may comprise a serpentine channel region (12205). In some embodiments, the serpentine channel region (12205) is heated. In some embodiments, the serpentine channel region (12205) may comprise one or more reaction zones (12206) within a heating region. In some embodiments, the reaction zones (12206) may be configured to perform one or more DETECTR assays. In some embodiments, the reaction zones (12206) comprise amplification enzymes or reagents. In some embodiments, the lyophilized reagents (12203) comprise one or more amplification enzymes or reagents which are reconstituted upon introduction of the sample into the sample interface and which, following reconstitution, may be transferred into the reaction chamber along with the sample. In some embodiments, the sample interface may be configured to concentrate, filter, lyse, or otherwise prepare the sample as described herein. In some embodiments, the reaction zones (12206) comprise visual assays that change color in the presence of a chemical. In some embodiments, the serpentine channel region (12205) is a nucleic acid amplification region. Alternatively, or in combination, the serpentine channel region may be configured to perform one or more programmable nuclease-based detection assays. In some embodiments, a valve may separate the detection region (12209) from the heating region (12205). In some embodiments, the device may comprise a pressure cracking valve (12208) that breaks under sufficient positive pressure and enable fluid movement between the two regions once broken (and, conversely, prevent fluid movement between the regions prior to positive pressure application). In some embodiments, a diluent or chase buffer may be injected into the device via the input port (12201) in order to break the pressure cracking valve (12208) and transfer the sample fluid from the heating/reaction region 12205 to the detection region 12209. In some embodiments, the device may receive positive gas pressure at the input port (12201). In some embodiments, breaking the pressure cracking valve (12208) allows the passage of liquids from the serpentine channel region (12205) to the lateral flow assay region (12209).

[0561] Described herein are various methods and devices for a handheld assay device as illustrated in FIG. 123. FIG. 123 illustrates an embodiment of a handheld assay device comprising an input port (12302), a spiral channel heating or reaction region (12303), a first actuator (12301), a second actuator (12304), and lateral flow assay region (12305). In some embodiments, a nucleic acid sample is delivered at the input port (12302) as described herein, and the sample flows through the spiral channel region (12303). In some embodiments, the sample interface 12302 may be configured to concentrate, filter, or otherwise prepare the sample as described herein prior to transfer into the reaction region 12303. In some embodiments, the first actuator (12301) stores mechanical energy. In some embodiments, the stored mechanical energy is stored as pressurized gas. In some embodiments, the stored mechanical energy is stored in compressed springs. In some embodiments, actuating the first actuator (12301) release the stored mechanical energy. In some embodiments, releasing the stored mechanical energy pushes fluid from the sample interface 12302 through the spiral channel region (12303). In some embodiments, releasing the stored mechanical energy pulls fluid through the spiral channel region (12303). In some embodiments, the spiral channel region may comprise amplification enzymes and reagents. In some embodiments, the sample interface may comprise amplification enzymes and reagents which can be transferred into the spiral channel region with the sample as described herein. In some embodiments, the nucleic acid sample is amplified in the spiral channel region (12303) as described herein. In some embodiments, the spiral channel region is heated. In some embodiments, the second actuator (12304) stores mechanical energy. In some embodiments, the stored mechanical energy is stored as pressured gas. In some embodiments, actuating the second actuator (12304) release the stored mechanical energy. In some embodiments, releasing the stored mechanical energy pushes the sample through the detection (e.g., lateral flow assay) region (12305). In some embodiments, releasing the stored mechanical energy pulls the sample through the lateral flow assay region (12305). The detection region may comprise one or more lateral flow assay strips as described herein.

[0562] Described herein are various methods and devices for a handheld assay device as illustrated in FIG. 124. FIG. 124 illustrates an embodiment of a handheld assay device breadboard comprising actuator triggers (12404, 12405), actuators (12403), a heating plate (12401), or a platen (12402), which may be configured to be used in conjunction with the fluid flow scheme described in FIG. 123, for example. In some embodiments, the handheld assay device may comprise a single-use, disposable assay component. In some embodiments, the handheld assay device may comprise reusable hardware framework that houses the single-use, disposable assay components (e.g., cartridges). In some embodiments, the single-use, disposable assay components are held by a platen (12402). In some embodiments, the disposable assay components comprise actuators storing mechanical energy as described herein. In some embodiments, the actuators are actuated by actuator triggers (12404, 12405). In some embodiments, the disposable assay components are heated by a heating plate (12401). In some embodiments, the entire device, including triggers, actuators, heating plate, platen, and fluidic components (including lateral flow assay strips, etc.) are coupled together (e.g., within a housing) in a single disposable unit.

[0563] FIG. 125 illustrates an embodiment of a fluid channel (12501) of a handheld assay device. Any of the devices described herein may comprise a spiral fluid channel as shown (e.g., the heating region or reaction region may comprise a spiral fluid channel). In some embodiments, the fluid channel (12501) is substantially spiral in shape. In some embodiments, the fluid channel (12501) is coupled to a port (12502). In some embodiments, the port (12502) is a input sample receiver. In some embodiments, the port (12502) is an input pressure receiver. In some embodiments, the port (12502) is an input diluent receiver. In some embodiments, the fluid channel (12501) may comprise enzymes or reagents. In some embodiments, the fluid channel (12501) is an amplification region. In some embodiments, the fluid channel (12501) is heated. In some embodiments, the fluid channel (12501) may comprise one or more DETECTR assay reagents as described herein.

[0564] FIG. 126 illustrates an embodiment of a lateral flow assay region of a handheld assay device which may be implemented in any of the devices described herein. In some embodiments, the path length leading to each lateral flow strip is substantially equal in fluid path length (12601) in order to ensure substantially equal fluidic resistances between channels for substantially equal transfer of fluids from the reaction region to the lateral flow assay strips of the lateral flow assay detection region. The fluid path length is defined as the length of the path that is taken by a fluid that moves from one end of a channel to the other end of the channel.

[0565] FIGS. 127A-127B show the breadboard device of FIG. 124 in action with the fluidic device of FIG. 123. In FIG. 127A, the spring-based actuator 12703 is loaded and the cartridge is ready for the addition of the sample into the sample interface. In FIG. 127B, the spring-based actuator is partially released and the sample has been pulled from the sample interface into the spiral reaction region. The spring is configured to stay in this position during the amplification and/or programmable nuclease-based detection reaction.

[0566] FIG. 128A depicts a chemical heating pouch disposed on the device of FIG. 123 for proof of concept testing. In some embodiments, the chemical heating pouch contains a solution comprising sodium acetate and a metal button, wherein pressing the metal button starts a crystallization reaction that is exothermic. The sample chamber (12801) of the disposable was exposed to allow for sample addition. The sample chamber disposable was nested between heated pouches (12802 and 12803). A temperature probe (12804) nested between the two pouches was used to measure the external temperature. A second temperature probe (12805) was used to measure fluid temperature inside the sample chamber. FIG. 128B depicts the temperature as a function of time measured at the chemical heating pouch (12806) and measured at the second temperature probe (12807). The temperature of the pouch was a couple of degrees hotter than the fluid temperature. In some embodiments, the temperature of the fluid approximately maintained a temperature of 53° C. for about 35 minutes. In some embodiments, the temperature of the fluid approximately maintained a temperature of 55° C. for about 30 minutes.

[0567] FIG. 129A-129B illustrate additional exemplary embodiments of a lateral flow assay region. In some embodiments, the sample fluid from the heated chamber may be transferred to the lateral flow assay region through aspiration, e.g., created by a syringe vacuum. In some embodiments, the lateral flow assay strips may be arranged in serial geometries as shown in FIG. 129A. In some embodiments, the lateral flow assay strips may be arranged in radial geometries as shown in FIG. 129B. In some embodiments, lateral flow assay strips may be arranged in parallel geometries as shown in FIG. 126. In some embodiments, the lateral flow strips may be used to capture programmable nuclease-mediated reporter cleavage as described herein.

[0568] FIG. 130 depicts an embodiment of a breadboard device for testing DETECTR reactions. The breadboard holds 3D printed disposable chips with reaction chamber and lateral flow strips. This embodiment is compatible for testing DETECTR reactions with chemical and electrical heating. In some embodiments, the device may comprise a fluidic drive (13001). In some embodiments, the device may comprise a chemical heating element (13002). In some embodiments, the chemical heating element (13002) may comprise a pouch containing sodium acetate solution and a metal disk, wherein pressing the metal disk triggers the crystallization in the sodium acetate solution. In some embodiments, the temperature of the heating chamber is brought to at least about 50 to at least about 60° C. In some embodiments, the device may comprise a polyamide resistive heater. In some embodiments, the temperature of the heating chamber is brought to at least about 54 to at least about 56° C. In some embodiments, the device may comprise clamps (13003). In some embodiments, the device may comprise lateral flow strips (13004). In some embodiments, the device may comprise electric heating elements (13005). In some embodiments, the device may comprise a polyamide resistive heater.

[0569] Described herein are various methods and devices for a handheld assay device as illustrated in FIGS. 131A-131B. In FIG. 131A, DETECTR analysis confirmed successful amplification of a duplex assay performed on an embodiment of a handheld device using electric heating. A 2-plex RT-LAMP assay was assembled using 2000 copies of HeLa RNA and 20,000 copies of a synthetic SARS-CoV-2 RNA. The experiment was performed with an assay temperature of 62° C. for 30 minutes. The amplification products were recovered from the chip and a DETECTR assay was performed using a Tecan plate reader to collect the results. A portion of the unamplified mastermix plus sample was stored on ice and used as the negative control for the DETECTR reaction. The resulting DETECTR curves confirm robust amplification had occurred on a spiral breadboard device using electric heating. In FIG. 131B, DETECTR analysis confirmed successful amplification of a duplex assay on an embodiment of a handheld device using chemical heating. A 2-plex RT-LAMP assay was assembled using 2000 copies of HeLa RNA and 20,000 copies of a synthetic SARS-CoV-2 RNA. The experiment was performed with an assay temperature of 55° C. for 60 minutes. The amplification products were recovered from the chip and a DETECTR™ assay was performed using a Tecan plate reader to collect the results. A portion of the unamplified mastermix plus sample was stored on ice and used as the negative control for the DETECTR reaction. The resulting DETECTR curves confirmed robust amplification had occurred on a spiral breadboard device using chemical heating.

[0570] FIG. 132 depicts a DETECTR reaction with lateral flow readout performed on the breadboard device of FIG. 130 with a disposable chip similar to the device shown in FIG. 122. The disposable chip was loaded with 200 μL of DETECTR mastermix containing RT-LAMP amplified SARS-CoV-2 N-gene. The disposable chip was incubated on the breadboard device for 20 minutes using the electric heater. A ‘chase’ buffer applied to the sample input port to dilute and move the DETECTR reaction onto the lateral flow strips. The strips were allowed to absorb the DETECTR reaction for four minutes before the results were photographed. A portion of the reaction was removed prior to incubating on the device and used as the negative control ‘off device.’ For testing Milenia HybridDetect lateral flow strips were used, which placed the control band in the lower position (13201) and the SARS-CoV-2 N-gene band distal to the control (13202).

[0571] Disclosed herein are methods for optimizing proteins and formulations for diagnostic applications. An ideal Cas protein for CRISPR diagnostics is one that is fast, robust, and sensitive. A fast protein enables reduced turnaround times for diagnostic assays. Robust enzymes are more likely to be successful when combined with other molecular processes, such as in the one-pot DETECTR assay. Sensitive enzymes enable lower limits of detection from either small amounts of amplified product or when eliminating pre-amplification and doing direct detection of target nucleic acids. FIG. 133 illustrates a flow diagram of a process used to evaluate, characterize, and optimize proteins for diagnostic applications. Proteins may be evaluated based on thermostability, compatibility with various assay buffers, and sensitivity. FIG. 134 illustrates a schematic showing a workflow for the process using Labcyte Echo. Using Labcyte echo enables 4.5× faster evaluation and characterization of enzymes in comparison to manual or semi-automated setup.

[0572] Initial optimization of programmable nuclease systems (e.g., the combination of Cas protein and guide nucleic acids) involved screening the performance of candidate systems in a variety of buffers and at temperatures from 35° C. to 60° C. The buffers selected for screening included buffers used in DETECTR assays and other Cas activity buffers. The buffers may comprise a range of salt types, salt concentrations, counter ion types, and various additives important for polymerase performance.

[0573] FIG. 135 shows the results of three candidate Cas enzymes trials. The results of trans-cleavage assays for the Cas enzymes exemplified the differences that were observed between enzyme performance. For example, CasM.1382 performed strongly in Cas buffer #2, and had little activity in Amp buffer #1. In Cas buffer #3, which had high levels of Mg⁺², elevated background signals were observed in the no-target controls. CasM.1346 showed strong performance in various buffers. The kinetic curves from this enzyme suggest that it was fast and sensitive, which lead to a large initial signal increase at multiple temperatures, but the enzyme quickly denatured and did not demonstrate sustained activity at temperatures over 40° C. CasM.1740 showed slower activity in comparison to CasM.1346. CasM.1740 showed robust and continued activity at temperatures as high as 50° C. but not at 55° C., suggesting that CasM. 1740 is a thermostable Cas protein and may be compatible with a variety of assay designs for direct detection or when coupled to other signal amplification processes.

[0574] FIG. 136 shows the performance of three candidate Cas enzymes at different temperatures and buffers.

[0575] FIG. 137 shows the results of testing conducted with CasM. 1740 with three additional buffers at 35° C. CasM.1740 was robustly active in some polymerase buffers and many enzyme activity buffers. The results show that the performance of the enzymes may be optimized or enhanced by using certain buffers.

[0576] FIG. 138 shows the results of experiments investigating the limits of detection on single-strand oligo or synthetic dsDNA target at 35° C. Some systems, although functional, did not have robust limits of detection such as CasM.1714. Some performed similarly or potentially outperformed the control system CasM.26 (a Cas having SEQ ID NO: 21).

[0577] FIG. 139 shows the results of experiments evaluating the limit of detection at both 35° C. and the highest temperature that the protein was demonstrated to function at for CasM.1740. At both 35° C. and 50° C., the performance of the enzyme was similar with the ability to detect 5 μM of a target.

[0578] FIG. 140 shows the results of experiments investigating the effects of additives and assay formulations on the performance of the proteins. Additives included those used for lyophilization (e.g., trehalose), for stabilizing protein performance (e.g., BSA), and for reducing water content and crowding reactions (e.g., PEG). Assay formulations comprised a buffer, enzyme, primer, and dNTP concentrations used in one-pot DETECTR and two-pot DETECTR reactions. In some cases, the additives had little or no effect (e.g., CasM.1382 and CasM.1698), and in some cases, the additives boost the performance of the enzyme (e.g., CasM.1434). Some enzymes were more or less tolerant of assay formulations. For example, CasM. 1698 performed well in the two-pot DETECTR assay formulation and had reduced activity in the one-pot DETECTR assay formulation. In contrast, CasM. 1382 showed similar performance to CasM.1698 when no additives are used and was almost completely inhibited in the one-pot DETECTR assay formulation. This suggest that CasM. 1382 may be more robust in a range of assay conditions.

[0579] FIG. 141, FIG. 142, and FIG. 143 show the results of experiments investigating the sensitivity of Cas proteins to single-nucleotide mutations. Proteins that have high sensitivity to mutations may be useful for genotyping applications, such as the detection of viral strains or somatic genotyping for disease alleles. Meanwhile, proteins that have low sensitivity to mutations may be useful for assays where robust detection is most important. To evaluate single nucleotide mutation sensitivity of each protein, a series of synthetic dsDNA target molecules that contained all 4 potential mutations at every position along the target site and in the PAM region were synthesized. Each protein is screened in optimal conditions, as previously determined. For proteins with strong sensitivity to single nucleotide mutations, a high signal from the DETECTR assay was observed only for the nucleotides that match those in the gRNA. For proteins with low sensitivity to single nucleotide mutations, a high signal from the DETECTR assay was observed for one more nucleotides, regardless of whether the nucleotide matches those in the gRNA or not. FIG. 141 shows the results for CasM. 124070 which showed strong single nucleotide mutation sensitivity. FIG. 142 shows the results for CasM.08, which shows that the sensitivity depended on the target site. FIG. 143 shows the results for CasM.124070 and CasM.08 with the same target site, showing that different proteins had different sensitivity to the same target site.

[0580] FIGS. 144A-144B show the results of experiments investigating the kinetics of trans-cleavage for proteins that have the best performance in terms of sensitivity, specificity, or thermostability. RNP complexes were prepared and incubated with target DNA or RNA for 30 minutes at the optimal temperature for the system. Various concentrations of quenched fluorescent reporters were added to the system and a plate reader was used to measure the fluorescence over time. The results were normalized across machines and temperatures for each protein. Michaelis-Menten kinetics were analyzed for each system. The results showed striking differences in the catalytic efficiency between Cas effectors. The results suggest that systems with the greatest catalytic efficiency tend to have the lowest limit of detection.

[0581] FIG. 145 summarizes the performance results for various Cas enzymes.

[0582] FIG. 146 shows a schematic of an exemplary workflow for a multiplexed programmable nuclease assay. Any of the devices described herein may be configured to perform one or more of the reactions described herein (e.g., amplification, detection, etc.) in separate chambers. In at least some instances, fluidly isolating reactions for different target nucleic acids may facilitate multiplexing.

[0583] FIGS. 147 and 148 show a non-limiting exemplary handheld device for performing a multiplexed programmable nuclease (e.g., DETECTR) assay using a workflow as shown in FIG. 146. In some embodiments, a sample contains one or more target nucleic acid sequences. In some embodiments, the sample is introduced into a sample input (also referred to herein as a sample interface) and loaded into a plurality of sample loading chambers via a sample loading channel. In some embodiments, the sample interface may be configured to concentrate, filter, lyse, or otherwise prepare the sample as described herein. In some embodiments, positive pressure is applied to the sample interface by a positive pressure source (e.g., a syringe) in order to load the sample loading channel and sample loading chambers with the sample. In some embodiments, the sample is a lysis sample. The sample loading channel may be configured (e.g., sized and shaped) to load the plurality of sample loading chambers with a pre-determined volume of sample liquid. Upon loading of the sample loading chambers, sufficient positive pressure may be applied to the sample loading channel and chambers in order to break the pressure cracking valves coupled to each sample loading chamber. Sample liquid is then transferred downstream of each sample loading chamber to a reaction chamber via a fluid channel. In some embodiments, each reaction chamber is fluidly independent of every other reaction chamber in order to facilitate target analysis multiplexing. The reaction chambers may comprise one or more dried or lyophilized programmable nuclease reagents (e.g., immobilized to a glass bead) and/or one or more liquid, dried, or lyophilized amplification reagents (e.g., powdered). In some embodiments, amplification of one or more target nucleic acids is performed in each reaction chamber. In some embodiments, the amplification reagents of each reaction chamber may be different and may be designed to amplify different target nucleic acids of a plurality of target nucleic acids. The reaction chambers may be heated (e.g., to 55 C for 20 minutes or less) to amplify the one or more target nucleic acids as described herein. In some embodiments, heating may facilitate programmable nuclease-based detection reaction as described herein. Heating can include liquid-phase chemical heating, solid phase chemical heating, and electric heating (including, but not limited to, resistance/Joule heating, induction heating, Peltier heat pumping, etc.). In some embodiments, the amplification and detection reactions may be performed as a one-pot or hot pot reaction as described herein.

[0584] In some embodiments, the device includes multiple lateral flow strips. Each reaction chamber may be configured to interface with a detection region comprising a lateral flow strip. In some embodiments, the detection region may be in fluid communication with the reaction chamber. In some embodiments, the detection region may be contacted to the reaction chamber after amplification and the programmable nuclease-based reactions have been performed in the reaction chamber. In some embodiments, the lateral flow strips may be configured to be inserted into the reaction chambers as shown in FIG. 147. In some embodiments, the lateral flow strips may be configured to be inserted into the reaction chambers at the same time or at different times.

[0585] In some embodiments, each reaction chamber may comprise one or more guide nucleic acids (e.g., sgRNAs) immobilized to a surface (e.g., a glass bead or hydrogel disposed within a reaction chamber). In some embodiments, the guide nucleic acids are part of a programmable nuclease (e.g., Cas-complex) probe immobilized to a surface. In some embodiments, a guide nucleic acid is designed to specifically bind to a target nucleic acid in the sample. In some embodiments, there are different guide nucleic acids corresponding to different reaction chambers, where each different guide nucleic acid is complimentary for a different target nucleic acid sequence that may or may not be present in the sample. In some embodiments, in addition to the programmable nuclease probes containing guide nucleic acids, each reaction chamber may contain or be functionalized with one or more reporters having distinct functional groups as described herein. In some embodiments, the reporters may be in close enough proximity to be cleaved by the programmable nuclease probes. In some embodiments, as described in example 13, reporters are cleaved and portion thereof (e.g., a detection moiety) is released into the solution upon binding between a particular guide nucleic acid and the target nucleic acid to which the guide nucleic acid is designed to specifically bind. In some embodiments, reporters are functionalized with a detection moiety (e.g., a label).

[0586] In some embodiments, chemical heating may be used. In some embodiments, chemical heating may be used to supply energy to initiate and run reactions. In some embodiments, chemical heating may be used to supply energy to initiate and run programmable nuclease assay reactions. In some embodiments, chemical heating may be used to heat reaction or heating zones. In some embodiments, chemical heating may be used to heat regions, chambers, volumes, zones, surfaces, or areas of a device.

[0587] In some embodiments, the device may comprise one or more lateral flow assay strips in a detection region disposed downstream of the reaction chamber. In some embodiments, the device may comprise one or more lateral flow assay strips in a detection region which may be brought into fluid communication with the reaction chamber. Each lateral flow assay strip contains one or more detection regions or spots, where each detection region or spot contains a different type of capture antibody. In some embodiments, each lateral flow assay strip contains a different type of capture antibody. In some embodiments, each capture antibody type specifically binds to a particular label type of a reporter. In some embodiments, a first lateral flow assay strip contains the capture antibody anti-FITC. In some embodiments, a first DETECTR region or surface location (e.g., within a first reaction chamber) contains the immobilized programmable nuclease (e.g., Cas-complex) including the guide nucleic acid (e.g., sgRNA) specific to the first target nucleic acid sequence. In some embodiments, the first DETECTR region or surface location additionally contains a first immobilized reporter which is labeled with a first detection moiety (e.g., FITC). In some embodiments, upon binding of the first target nucleic acid sequence, the first immobilized reporter is cleaved and released into solution. In some embodiments, the first detection moiety is released into solution and the remainder of the first reporter remains immobilized on the surface. Alternatively, or in combination, in some embodiments, a second lateral flow assay strip contains the capture antibody anti-DIG. In some embodiments, a second DETECTR region or surface location (e.g., within a second reaction chamber) contains the immobilized programmable nuclease (e.g., Cas complex) including the guide nucleic acid (e.g., sgRNA) specific to the second target nucleic acid sequence. In some embodiments, the second DETECTR region or surface location additionally contains a second immobilized reporter which is labeled with a second detection moiety (e.g., DIG). Therefore, in some embodiments, upon binding of the second target nucleic acid sequence, the second immobilized reporter is cleaved and released into solution. In some embodiments, the second detection moiety is released into solution and the remainder of the second reporter remains immobilized on the surface.

[0588] In some embodiments, the solutions containing the first or second cleaved reporters are transferred from their respective reaction chambers to a first lateral flow assay strip and a second lateral flow assay strip, respectively. In some embodiments, a chase buffer or diluent is introduced into a diluent input and negative pressure is applied to the negative pressure port to contact the solutions containing the first or second cleaved reporters to their respective lateral flow assay strips. The reporters may be bound to conjugate molecules e.g., anti-biotin-AuNPs. In some embodiments, the AuNP-reporter conjugates having the first reporter labeled with the first detection moiety (e.g., FITC) will selectively bind to a first detection region or spot containing the first capture antibody (e.g., anti-FITC) on the first lateral flow assay strip, thus indicating the presence of the first target nucleic acid sequence in the sample. In some embodiments, the AuNP-reporter conjugates having mostly the second reporter labeled with the second detection moiety (e.g., DIG) will selectively bind to a second detection region or spot containing the second capture antibody (e.g., anti-DIG) on the second lateral flow assay strip, thus indicating the presence of the second target nucleic acid sequence in the sample. In this manner, for some embodiments, parallel detection of two or more target nucleic acid sequences present in a multiplexed sample is enabled.

[0589] In some embodiments, the device may comprise more than one lateral flow assay strip. For example, the device may comprise two, three, four, five, six, seven, eight, nine, ten, or more lateral flow assay strips. In some embodiments, each reaction chamber may be interfaced with a lateral flow assay strip for multiplexing. In some embodiments, one or more lateral flow assay strips are configured to detect a control sequence instead of or in addition to a target sequence. For example, a device comprising six lateral flow assay strips may comprise five lateral flow assay strips configured to detect one or more target sequences (e.g., five different target sequences) and one lateral flow assay strip configured to detect a control sequence.

[0590] Described herein are various methods and devices for chemical heating-based PON devices utilizing lateral flow assay strips for DETECTR readout. FIGS. 163A-163D illustrate a non-limiting example of a handheld device for performing a multiplexed programmable nuclease (e.g., DETECTR) assay using a workflow as shown in FIG. 146. In some embodiments, the handheld device may be configured to provide a heating source for applications (e.g., amplification and/or DETECTR reactions) that do not allow for the use of battery or other electrical power supplies (such as in remote locations without easy access to reliable sources of electricity. In certain instances, the handheld device may comprise sodium acetate to provide heating to one or more heating regions of the device, via heat released by the exothermic chemical reaction of sodium acetate. In some embodiments, the design of the handheld device may allow for uniform heating of the amplification and/or DETECTR reaction components by uniformly surrounding the reaction chamber(s) with a sodium acetate heating agent reservoir.

[0591] FIGS. 163A-163D illustrate a non-limiting example of a handheld device for performing a multiplexed programmable nuclease (e.g., DETECTR) assay using a workflow as shown in FIG. 146. FIG. 163A shows a perspective view of the handheld device with reaction chambers exposed. FIG. 163B shows a perspective view of the handheld device with a sample loading layer covering the reaction chambers. FIG. 163C shows a perspective view of the fully assembled handheld device including positive pressure source engaged with a sample interface of the sample loading layer. FIG. 163D shows a cross-sectional view of the handheld device highlighting the relative locations of the reaction chamber and detection region within a heating reservoir. The device of FIGS. 163A-163D may be substantially similar to the devices shown in FIGS. 147-148, with the addition of a heating reservoir configured to surround the reaction chambers in order to provide integrated, sustained, even heating during isothermal amplification and/or programmable nuclease-based detection reactions.

[0592] In some embodiments, a sample contains one or more target nucleic acid sequences. In some embodiments, the sample is introduced into a sample input (also referred to herein as a sample interface) and loaded into a plurality of sample loading chambers via a sample loading channel. In some embodiments, the sample interface may be configured to concentrate, filter, lyse, or otherwise prepare the sample as described herein. In some embodiments, the sample may be loaded into the sample loading channel and sample loading chambers automatically via gravity and/or capillary forces. Alternatively, or in combination, positive pressure may be applied to the sample interface by a positive pressure source (e.g., a syringe) in order to load the sample loading channel and sample loading chambers with the sample. In some embodiments, the sample is a lysis sample. The sample loading channel may be configured (e.g., sized and shaped) to load the plurality of sample loading chambers with a pre-determined volume of sample liquid. Upon loading of the sample loading chambers, sufficient positive pressure may be applied to the sample loading channel and chambers in order to break the pressure cracking valves coupled to each sample loading chamber. Sample liquid is then transferred downstream of each sample loading chamber to a reaction chamber via a fluid channel. In some embodiments, a downstream end of the fluid channel may comprise a valve, hydrophobic filter, or frit or the like configured to allow gas to pass through during positive pressure application to the sample interface and enable fluid to flow along the fluid channel unimpeded. The hydrophobic filter or frit may be configured to prevent liquid to pass through as the sample is moved into the reaction chamber. In some embodiments, the sample input, sample loading channel(s), and/or sample loading chamber(s) may be located in a sample loading layer of the device. In some embodiments, the sample loading layer may be fluidly coupled to the reaction chambers. In some embodiments, the sample loading layer may be disposed above the reaction chambers. In some embodiments, the sample loading layer may be a chip or microfluidic device assembled over a housing comprising the reaction chambers. In some embodiments, each reaction chamber is fluidly independent of every other reaction chamber in order to facilitate target analysis multiplexing. The reaction chambers may comprise one or more dried or lyophilized programmable nuclease reagents (e.g., immobilized to a glass bead) and/or one or more liquid, dried, or lyophilized amplification reagents (e.g., powdered). In some embodiments, the programmable nuclease reagents and/or amplification reagents may be added by a user prior to use (e.g., pipetted into the reaction chambers by a user prior to connecting a sample loading layer thereto) and/or added during manufacturing. In some embodiments, amplification of one or more target nucleic acids is performed in each reaction chamber. In some embodiments, the amplification reagents of each reaction chamber may be different and may be designed to amplify different target nucleic acids of a plurality of target nucleic acids. The reaction chambers may be heated (e.g., to 55 C for 20 minutes or less) to amplify the one or more target nucleic acids as described herein. In some embodiments, heating may facilitate programmable nuclease-based detection reaction as described herein. Heating can include liquid-phase chemical heating, solid phase chemical heating, and electric heating (including, but not limited to, resistance/Joule heating, induction heating, Peltier heat pumping, etc.). In some embodiments, the reaction chambers may be surrounded by or disposed in a heating reservoir or zone. For example, the reaction chambers may comprise vertical chambers which are substantially surrounded by a heating reservoir as shown in FIG. 163D. The heating reservoir may comprise a liquid-phase chemical heating agent, a solid-phase chemical heating agent, or an electrical heater. In some embodiments, the amplification and detection reactions may be performed as a one-pot or hot pot reaction as described herein.

[0593] In some embodiments, the device includes multiple lateral flow strips. Each reaction chamber may be configured to interface with a detection region comprising a lateral flow strip. In some embodiments, the detection region may be in fluid communication with the reaction chamber. In some embodiments, the detection region may be contacted to the reaction chamber after amplification and the programmable nuclease-based reactions have been performed in the reaction chamber. In some embodiments, the lateral flow strips may be configured to be inserted into the reaction chambers as shown in FIG. 163D. In some embodiments, the lateral flow strips may be configured to be inserted into the reaction chambers at the same time or at different times. For example, the lateral flow strips may be disposed on a detection tray configured to be actuated from a first position, in which the lateral flow strips are not in fluid communication with their respective reaction chambers, to a second position, in which the lateral flow strips are in fluid communication with their respective reaction chambers. In some embodiments, the reaction chambers may be vertical chambers surrounded by a heating reservoir and the detection tray may be configured to hold the lateral flow strips at an angle relative to the vertical chambers (e.g., perpendicular) in order to facilitate wicking and capillary flow of the fluid from the reaction chambers along the lateral flow strips. Insertion of the detection tray into the housing comprising the chemical heating reservoir and reaction chambers may actuate the detection tray from the first position to the section position and bring the lateral flow strips into fluid communication with their respective reaction chambers in order to enable visual readout of the programmable nuclease-based reaction.

[0594] In some embodiments, each reaction chamber may comprise one or more guide nucleic acids (e.g., sgRNAs) immobilized to a surface (e.g., a glass bead or hydrogel disposed within a reaction chamber). In some embodiments, the guide nucleic acids are part of a programmable nuclease (e.g., Cas-complex) probe immobilized to a surface. In some embodiments, a guide nucleic acid is designed to specifically bind to a target nucleic acid in the sample. In some embodiments, there are different guide nucleic acids corresponding to different reaction chambers, where each different guide nucleic acid is complimentary for a different target nucleic acid sequence that may or may not be present in the sample. In some embodiments, in addition to the programmable nuclease probes containing guide nucleic acids, each reaction chamber may contain or be functionalized with one or more reporters having distinct functional groups as described herein. In some embodiments, the reporters may be in close enough proximity to be cleaved by the programmable nuclease probes. In some embodiments, as described in example 13, reporters are cleaved and portion thereof (e.g., a detection moiety) is released into the solution upon binding between a particular guide nucleic acid and the target nucleic acid to which the guide nucleic acid is designed to specifically bind. In some embodiments, reporters are functionalized with a detection moiety (e.g., a label).

[0595] In some embodiments, chemical heating may be used. In some embodiments, chemical heating may be used to supply energy to initiate and run reactions. In some embodiments, chemical heating may be used to supply energy to initiate and run programmable nuclease assay reactions. In some embodiments, chemical heating may be used to heat reaction or heating zones. In some embodiments, chemical heating may be used to heat regions, chambers, volumes, zones, surfaces, or areas of a device. In some embodiments, the reaction chambers may be surrounded by or disposed in a heating reservoir or zone. The heating reservoir may comprise a liquid-phase chemical heating agent configured to generate an exothermic chemical reaction upon contact with a nucleation site. For example, a piercer may be configured to pierce through a film surrounding the heating reservoir and contact the liquid-phase chemical heating agent (e.g., sodium acetate). The piercer may provide a nucleation site for crystallization of the liquid-phase chemical heating agent to begin phase change transformation and thereby generate heat within the heating reservoir. The amount of chemical heating agent may be adjusted to provide a desired temperature and/or duration of heating to the reaction chambers.

[0596] In some embodiments, the device may comprise one or more lateral flow assay strips in a detection region disposed downstream of the reaction chamber. In some embodiments, the device may comprise one or more lateral flow assay strips in a detection region which may be brought into fluid communication with the reaction chamber. In some embodiments, the detection region comprises a detection tray. Each lateral flow assay strip contains one or more detection regions or spots, where each detection region or spot contains a different type of capture antibody. In some embodiments, each lateral flow assay strip contains a different type of capture antibody. In some embodiments, each capture antibody type specifically binds to a particular label type of a reporter. In some embodiments, a first lateral flow assay strip contains the capture antibody anti-FITC. In some embodiments, a first DETECTR region or surface location (e.g., within a first reaction chamber) contains the immobilized programmable nuclease (e.g., Cas-complex) including the guide nucleic acid (e.g., sgRNA) specific to the first target nucleic acid sequence. In some embodiments, the first DETECTR region or surface location additionally contains a first immobilized reporter which is labeled with a first detection moiety (e.g., FITC). In some embodiments, the first reporter may be immobilized within a hydrogel as described herein. In some embodiments, upon binding of the first target nucleic acid sequence, the first immobilized reporter is cleaved and released into solution. In some embodiments, the first detection moiety is released into solution and the remainder of the first reporter remains immobilized on the surface. Alternatively, or in combination, in some embodiments, a second lateral flow assay strip contains the capture antibody anti-DIG. In some embodiments, a second DETECTR region or surface location (e.g., within a second reaction chamber) contains the immobilized programmable nuclease (e.g., Cas complex) including the guide nucleic acid (e.g., sgRNA) specific to the second target nucleic acid sequence. In some embodiments, the second DETECTR region or surface location additionally contains a second immobilized reporter which is labeled with a second detection moiety (e.g., DIG). In some embodiments, the second reporter may be immobilized within a hydrogel as described herein. Therefore, in some embodiments, upon binding of the second target nucleic acid sequence, the second immobilized reporter is cleaved and released into solution. In some embodiments, the second detection moiety is released into solution and the remainder of the second reporter remains immobilized on the surface.

[0597] In some embodiments, the solutions containing the first or second cleaved reporters are transferred from their respective reaction chambers to a first lateral flow assay strip and a second lateral flow assay strip, respectively. In some embodiments, a chase buffer or diluent is introduced into a diluent input and pressure is applied to contact the solutions containing the first or second cleaved reporters to their respective lateral flow assay strips. In some embodiments, the reaction chambers are vertical reaction chambers and gravity is used to provide fluid flow between the reaction chambers and their respective lateral flow assay strips. The reporters may be bound to conjugate molecules e.g., anti-biotin-AuNPs. In some embodiments, the AuNP-reporter conjugates having the first reporter labeled with the first detection moiety (e.g., FITC) will selectively bind to a first detection region or spot containing the first capture antibody (e.g., anti-FITC) on the first lateral flow assay strip, thus indicating the presence of the first target nucleic acid sequence in the sample. In some embodiments, the AuNP-reporter conjugates having mostly the second reporter labeled with the second detection moiety (e.g., DIG) will selectively bind to a second detection region or spot containing the second capture antibody (e.g., anti-DIG) on the second lateral flow assay strip, thus indicating the presence of the second target nucleic acid sequence in the sample. In this manner, for some embodiments, parallel detection of two or more target nucleic acid sequences present in a multiplexed sample is enabled.

[0598] In some embodiments, the device may comprise more than one lateral flow assay strip. For example, the device may comprise two, three, four, five, six, seven, eight, nine, ten, or more lateral flow assay strips. In some embodiments, each reaction chamber may be interfaced with a lateral flow assay strip for multiplexing. In some embodiments, one or more lateral flow assay strips are configured to detect a control sequence instead of or in addition to a target sequence. For example, a device comprising six lateral flow assay strips may comprise five lateral flow assay strips configured to detect one or more target sequences (e.g., five different target sequences) and one lateral flow assay strip configured to detect a control sequence.

[0599] In some embodiments, the isothermal amplification and/or programmable nuclease-based reaction may be completed in about 40 minutes. In some embodiments, the isothermal amplification and/or programmable nuclease-based reaction may be completed in less than about 40 minutes. In some embodiments, the isothermal amplification and/or programmable nuclease-based reaction may be completed in greater than about 40 minutes. In some embodiments, the isothermal amplification and/or programmable nuclease-based reaction may be completed in about 25 minutes to about 35 minutes. In some embodiments, the isothermal amplification and/or programmable nuclease-based reaction may be completed in about 35 minutes to about 45 minutes. In some embodiments, the isothermal amplification and/or programmable nuclease-based reaction may be completed in about 45 minutes to about 55 minutes.

[0600] In some embodiments, results may be ready in less than about 1 minute after the sample begins the capillary process across the lateral flow assay strip. In some embodiments, results may be ready in less than about 2 minutes after the sample begins the capillary process across the lateral flow assay strip. In some embodiments, results may be ready in less than about 3 minutes after the sample begins the capillary process across the lateral flow assay strip. In some embodiments, results may be ready in less than about 5 minutes after the sample begins the capillary process across the lateral flow assay strip.

[0601] Described herein are various methods and devices for chemical heating-based PON devices utilizing lateral flow assay strips for DETECTR readout. FIGS. 178-184 illustrate a non-limiting example of a handheld device for performing a programmable nuclease (e.g., DETECTR) assay using a workflow as shown in FIG. 146. In some embodiments, the handheld device may be configured to provide a heating source for applications (e.g., amplification and/or DETECTR reactions) that do not allow for the use of battery or other electrical power supplies (such as in remote locations without easy access to reliable sources of electricity. In certain instances, the handheld device may comprise sodium acetate to provide heating to one or more heating regions of the device, via heat released by the exothermic chemical reaction of sodium acetate. In some embodiments, the design of the handheld device may allow for uniform heating of the amplification and/or DETECTR reaction components by uniformly surrounding the reaction chamber(s) with a sodium acetate heating agent reservoir.

[0602] FIGS. 178-184 illustrate a non-limiting example of a handheld device for performing a programmable nuclease (e.g., DETECTR) assay using a workflow as shown in FIG. 146. FIG. 178 shows a perspective view of the fully assembled handheld device including negative pressure source (e.g., detection pen) engaged with a detection interface of the housing. FIG. 179 shows a cross-sectional view of the handheld device highlighting the relative locations of the reaction channel/chamber and detection region within a heating reservoir. FIG. 180 shows a reaction channel component of the handheld device. FIG. 181 shows an isometric view of a detection pen of the handheld device. FIG. 182 shows a cross-sectional view of the detection pen. FIG. 183 shows an exploded view of the detection pen. FIG. 184 shows a cross-sectional view of a sample preparation reservoir of the handheld device. The handheld device of FIGS. 163A-163D may be substantially similar to the devices shown in FIGS. 163A-163D, with the addition of a detection pen configured to provide negative pressure to the system to affect fluid movement therein and provide a fluid pathway for the reaction volume to contact a lateral flow assay strip disposed therein. Additionally, an optional sample preparation reservoir comprising a scraper comprising a plurality of vertical rungs may be provided by the handheld device.

[0603] In some embodiments, a sample contains one or more target nucleic acid sequences. In some embodiments, the sample is introduced into a sample input (also referred to herein as a sample interface) and loaded into a plurality of sample loading chambers via a sample loading channel. In some embodiments, the sample interface may be configured to concentrate, filter, lyse, or otherwise prepare the sample as described herein. In some embodiments, a separate sample preparation reservoir may be provided and configured to concentrate, filter, lyse, or otherwise prepare the sample as described herein before the sample is loaded into the sample interface. In some embodiments, the sample may be loaded into the sample loading channel and sample loading chambers automatically via gravity and/or capillary forces. Alternatively, or in combination, negative pressure may be applied to the detection interface by a negative pressure source (e.g., a syringe) in order to load the sample loading channel and sample loading chambers with the sample. In some embodiments, the negative pressure source may be in the form of a detection pen comprising a lateral flow assay strip disposed therein. Counter-clockwise, upwards rotation of the actuator cap of the detection pen from a first configuration to a second configuration may draw fluid into the reaction channel or chamber from the sample interface. In some embodiments, the sample is a lysis sample. In some embodiments, the device may comprise a single reaction channel or chamber. In some embodiments, the device may comprise a plurality of reaction channels or chambers. In some embodiments, each reaction chamber is fluidly independent of every other reaction chamber in order to facilitate target analysis multiplexing. The reaction chamber(s) may comprise one or more dried or lyophilized programmable nuclease reagents (e.g., immobilized to a glass bead) and/or one or more liquid, dried, or lyophilized amplification reagents (e.g., powdered). In some embodiments, the programmable nuclease reagents and/or amplification reagents may be added by a user prior to use and/or added during manufacturing. In some embodiments, amplification of one or more target nucleic acids is performed in each reaction chamber. In some embodiments, the amplification reagents of each reaction chamber may be different and may be designed to amplify different target nucleic acids of a plurality of target nucleic acids. The reaction chambers may be heated (e.g., to 55 C for 20 minutes or less) to amplify the one or more target nucleic acids as described herein. In some embodiments, heating may facilitate programmable nuclease-based detection reaction as described herein. Heating can include liquid-phase chemical heating, solid phase chemical heating, and electric heating (including, but not limited to, resistance/Joule heating, induction heating, Peltier heat pumping, etc.). In some embodiments, the reaction chambers may be surrounded by or disposed in a heating reservoir or zone. For example, the reaction chambers may comprise serpentine channels or spiral tubes which are substantially surrounded by a heating reservoir as shown in FIG. 180. The heating reservoir may comprise a liquid-phase chemical heating agent, a solid-phase chemical heating agent, or an electrical heater. In some embodiments, the amplification and detection reactions may be performed as a one-pot or hot pot reaction as described herein.

[0604] In some embodiments, the device includes one or more lateral flow strips disposed within one or more detection pens. Each reaction chamber may be configured to interface with a detection region comprising a lateral flow strip. In some embodiments, the detection region may be in fluid communication with the reaction chamber. In some embodiments, the detection region may be contacted to the reaction chamber after amplification and the programmable nuclease-based reactions have been performed in the reaction chamber. In some embodiments, the lateral flow strip may be configured to be inserted adjacent or into the reaction chamber/channel as shown in FIG. 179. In some embodiments, a plurality of lateral flow strips may be configured to be inserted into the reaction chambers at the same time or at different times. In some embodiments, the lateral flow strip(s) may be disposed in a detection pen(s) configured to be actuated from a first position, in which the lateral flow strip(s) is not in fluid communication with its respective reaction chamber(s), to a second position, in which the lateral flow strip(s) is in fluid communication with its respective reaction chamber(s). In some embodiments, the lateral flow strip(s) may be disposed in a detection pen(s) configured to draw the reaction liquid along a fluid flow path(s) toward the lateral flow strip(s). The lateral flow strip(s) may be in fluid communication with the reaction chamber(s) and actuation of the actuator cap of the detection pen from the second configuration to a third configuration may provide negative pressure and draw the reaction products from the reaction chamber to the lateral flow strips. In some embodiments, the detection pen may be configured to hold the lateral flow strips at an angle relative to the reaction chambers (e.g., perpendicular, vertical).

[0605] In some embodiments, each reaction chamber may comprise one or more guide nucleic acids (e.g., sgRNAs) immobilized to a surface (e.g., a glass bead or hydrogel disposed within a reaction chamber). In some embodiments, the guide nucleic acids are part of a programmable nuclease (e.g., Cas-complex) probe immobilized to a surface. In some embodiments, a guide nucleic acid is designed to specifically bind to a target nucleic acid in the sample. In some embodiments, there are different guide nucleic acids corresponding to different reaction chambers, where each different guide nucleic acid is complimentary for a different target nucleic acid sequence that may or may not be present in the sample. In some embodiments, in addition to the programmable nuclease probes containing guide nucleic acids, each reaction chamber may contain or be functionalized with one or more reporters having distinct functional groups as described herein. In some embodiments, the reporters may be in close enough proximity to be cleaved by the programmable nuclease probes. In some embodiments, as described in example 13, reporters are cleaved and portion thereof (e.g., a detection moiety) is released into the solution upon binding between a particular guide nucleic acid and the target nucleic acid to which the guide nucleic acid is designed to specifically bind. In some embodiments, reporters are functionalized with a detection moiety (e.g., a label). In some embodiments, chemical heating may be used. In some embodiments, chemical heating may be used to supply energy to initiate and run reactions. In some embodiments, chemical heating may be used to supply energy to initiate and run programmable nuclease assay reactions. In some embodiments, chemical heating may be used to heat reaction or heating zones. In some embodiments, chemical heating may be used to heat regions, chambers, volumes, zones, surfaces, or areas of a device. In some embodiments, the reaction chambers may be surrounded by or disposed in a heating reservoir or zone. The heating reservoir may comprise a liquid-phase chemical heating agent configured to generate an exothermic chemical reaction upon contact with a nucleation site. For example, a piercer may be configured to pierce through a film surrounding the heating reservoir and contact the liquid-phase chemical heating agent (e.g., sodium acetate). The piercer may provide a nucleation site for crystallization of the liquid-phase chemical heating agent to begin phase change transformation and thereby generate heat within the heating reservoir. The amount of chemical heating agent may be adjusted to provide a desired temperature and/or duration of heating to the reaction chambers.

[0606] In some embodiments, the device may comprise one or more lateral flow assay strips in a detection region disposed downstream of the reaction chamber. In some embodiments, the device may comprise one or more lateral flow assay strips in a detection region which may be brought into fluid communication with the reaction chamber. In some embodiments, the detection region comprises a detection tray. Each lateral flow assay strip contains one or more detection regions or spots, where each detection region or spot contains a different type of capture antibody. In some embodiments, each lateral flow assay strip contains a different type of capture antibody. In some embodiments, each capture antibody type specifically binds to a particular label type of a reporter. In some embodiments, a first lateral flow assay strip contains the capture antibody anti-FITC. In some embodiments, a first DETECTR region or surface location (e.g., within a first reaction chamber) contains the immobilized programmable nuclease (e.g., Cas-complex) including the guide nucleic acid (e.g., sgRNA) specific to the first target nucleic acid sequence. In some embodiments, the first DETECTR region or surface location additionally contains a first immobilized reporter which is labeled with a first detection moiety (e.g., FITC). In some embodiments, the first reporter may be immobilized within a hydrogel as described herein. In some embodiments, upon binding of the first target nucleic acid sequence, the first immobilized reporter is cleaved and released into solution. In some embodiments, the first detection moiety is released into solution and the remainder of the first reporter remains immobilized on the surface. Alternatively, or in combination, in some embodiments, a second lateral flow assay strip contains the capture antibody anti-DIG. In some embodiments, a second DETECTR region or surface location (e.g., within a second reaction chamber) contains the immobilized programmable nuclease (e.g., Cas complex) including the guide nucleic acid (e.g., sgRNA) specific to the second target nucleic acid sequence. In some embodiments, the second DETECTR region or surface location additionally contains a second immobilized reporter which is labeled with a second detection moiety (e.g., DIG). In some embodiments, the second reporter may be immobilized within a hydrogel as described herein. Therefore, in some embodiments, upon binding of the second target nucleic acid sequence, the second immobilized reporter is cleaved and released into solution. In some embodiments, the second detection moiety is released into solution and the remainder of the second reporter remains immobilized on the surface.

[0607] In some embodiments, the solutions containing the first or second cleaved reporters are transferred from their respective reaction chambers to a first lateral flow assay strip and a second lateral flow assay strip, respectively. In some embodiments, a chase buffer or diluent is introduced into a diluent input and pressure is applied to contact the solutions containing the first or second cleaved reporters to their respective lateral flow assay strips. In some embodiments, the reaction chambers are vertical reaction chambers and gravity is used to provide fluid flow between the reaction chambers and their respective lateral flow assay strips. The reporters may be bound to conjugate molecules e.g., anti-biotin-AuNPs. In some embodiments, the AuNP-reporter conjugates having the first reporter labeled with the first detection moiety (e.g., FITC) will selectively bind to a first detection region or spot containing the first capture antibody (e.g., anti-FITC) on the first lateral flow assay strip, thus indicating the presence of the first target nucleic acid sequence in the sample. In some embodiments, the AuNP-reporter conjugates having mostly the second reporter labeled with the second detection moiety (e.g., DIG) will selectively bind to a second detection region or spot containing the second capture antibody (e.g., anti-DIG) on the second lateral flow assay strip, thus indicating the presence of the second target nucleic acid sequence in the sample. In this manner, for some embodiments, parallel detection of two or more target nucleic acid sequences present in a multiplexed sample is enabled.

[0608] In some embodiments, the device may comprise more than one lateral flow assay strip. For example, the device may comprise two, three, four, five, six, seven, eight, nine, ten, or more lateral flow assay strips. In some embodiments, each reaction chamber may be interfaced with a lateral flow assay strip for multiplexing. In some embodiments, one or more lateral flow assay strips are configured to detect a control sequence instead of or in addition to a target sequence. For example, a device comprising six lateral flow assay strips may comprise five lateral flow assay strips configured to detect one or more target sequences (e.g., five different target sequences) and one lateral flow assay strip configured to detect a control sequence.

[0609] In some embodiments, the isothermal amplification and/or programmable nuclease-based reaction may be completed in about 40 minutes. In some embodiments, the isothermal amplification and/or programmable nuclease-based reaction may be completed in less than about 40 minutes. In some embodiments, the isothermal amplification and/or programmable nuclease-based reaction may be completed in greater than about 40 minutes. In some embodiments, the isothermal amplification and/or programmable nuclease-based reaction may be completed in about 25 minutes to about 35 minutes. In some embodiments, the isothermal amplification and/or programmable nuclease-based reaction may be completed in about 35 minutes to about 45 minutes. In some embodiments, the isothermal amplification and/or programmable nuclease-based reaction may be completed in about 45 minutes to about 55 minutes.

[0610] In some embodiments, results may be ready in less than about 1 minute after the sample begins the capillary process across the lateral flow assay strip. In some embodiments, results may be ready in less than about 2 minutes after the sample begins the capillary process across the lateral flow assay strip. In some embodiments, results may be ready in less than about 3 minutes after the sample begins the capillary process across the lateral flow assay strip. In some embodiments, results may be ready in less than about 5 minutes after the sample begins the capillary process across the lateral flow assay strip.

[0611] Described herein are various methods and devices for chemical heating-based PON devices utilizing lateral flow assay strips for DETECTR readout. FIGS. 185-191C illustrate a non-limiting example of a handheld device for performing a multiplexed programmable nuclease (e.g., DETECTR) assay using a workflow as shown in FIG. 146. In some embodiments, the handheld device may be configured to provide a heating source for applications (e.g., amplification and/or DETECTR reactions) that do not allow for the use of battery or other electrical power supplies (such as in remote locations without easy access to reliable sources of electricity. In certain instances, the handheld device may comprise sodium acetate to provide heating to one or more heating regions of the device, via heat released by the exothermic chemical reaction of sodium acetate. In some embodiments, the design of the handheld device may allow for uniform heating of the amplification and/or DETECTR reaction components by uniformly surrounding the reaction chamber(s) with a sodium acetate heating agent reservoir.

[0612] FIG. 185 shows a point of care device for performing a multiplexed programmable nuclease (e.g., DETECTR) assay. FIG. 186 shows an exploded view of point of care device with fluidic chip assembly disposed between chemical heating packs.

[0613] FIGS. 187A-187C show various views of the chip assembly of the device. FIG. 187A shows a perspective view of a chip assembly comprising a fluidic chip, a plunger assembly, and a detection clip. FIG. 187B shows a top view of the chip assembly. FIG. 187C shows a front view of a detection card configured to be inserted into a detection interface of the detection clip. FIG. 188 shows side and top views of the fluidic chip of FIG. 187A. FIGS. 189A-189C show front (FIG. 189A), side (FIG. 189B), and cross-sectional (FIG. 189C) vies of the fully assembled chip assembly of FIG. 185 including a fluidic chip, a plunger assembly, a detection clip, and a detection card.

[0614] FIGS. 190A-190D show perspective (FIG. 190A), top (FIG. 190B), side (FIG. 190C), and bottom (FIG. 190D) views showing various configurations of the fluidic chip and plunger assembly in use. Prior to use, the plunger assembly may be disposed within the fluidic chip in an initial configuration as shown in the middle row. After the sample is added to the sample interface, the plunger assembly may be pulled back into a loaded configuration to draw the sample into the reaction chamber/channel as shown in the top row. After the amplification and/or DETECTR reactions are run, the plunger assembly may be pushed into a dispensing configuration to push the sample out of the reaction chamber/channel and into the sample interface/detection interface as shown in the bottom row. The detection card comprising lateral flow assay strips may then be inserted into the detection interface and the detection region may be visualized to determine if the target nucleic acid was present in the sample as described herein.

[0615] FIGS. 191A-191C show cross-sectional side (left) and top (right) views highlighting various configurations of the fluidic chip and plunger assembly in use. Prior to use, the plunger assembly may be disposed within the reaction chamber/channel of the fluidic chip in an initial configuration as shown in FIG. 191B. After the sample is added to the sample interface, the plunger assembly may be pulled back into a loaded configuration to draw the sample into the reaction chamber/channel as shown in FIG. 191A. A locking mechanism may prevent the plunger assembly from moving during the reaction. After the amplification and/or DETECTR reactions are run, the plunger assembly may be pushed into a dispensing configuration to push the sample out of the reaction chamber/channel and into the sample interface/detection interface as shown in FIG. 191C. A locking release mechanism may be actuated (e.g., by squeezing) to release the locking mechanism and allow the plunger assembly to move between configurations. The detection card comprising lateral flow assay strips may then be inserted into the detection interface and the detection region may be visualized to determine if the target nucleic acid was present in the sample as described herein.

### Enzyme-Linked Signal Amplification Strategies

[0616] Disclosed herein are systems, compositions, and methods for amplifying a signal from a target nucleic acid using an enzyme. In some embodiments, enzyme-based assays may allow for signal amplification of a binding event between one or more programmable nuclease probes and one or more target nucleic acids.

[0617] Disclosed herein are some strategies that use enzymes with programmable nucleases (e.g., DETECTR based assays) to amplify detection signals indicative of the presence of one or more target nucleic acids in a sample.

[0618] FIGS. 192A-192B show an enzyme-based signal generation and amplification strategy that involves a reporter (19208), wherein the reporter comprises a nucleic acid tether and an enzyme (19204). Activation of a programmable nuclease (19206) upon binding with its guide nucleic acid (19209) and a target nucleic acid (19205), may enable the programmable nuclease to carry out trans-cleavage of the nucleic acid tether of the reporter. The trans-cleavage of the nucleic acid tether may release the enzyme into solution. Release of the enzyme may create a detectable signal, for example, by the enzyme reacting with an enzyme substrate (19207) in a solution to induce a color change in the solution, thereby indicating the presence of the target nucleic acid in the sample.

[0619] FIG. 192A shows two exemplary embodiments of a reporter (19208) comprising an enzyme (19204) and a nucleic acid tether, wherein the nucleic acid tether immobilizes the reporter to a surface (19200). In some embodiments, the reporter may comprise an enzyme and a nucleic acid tether, e.g., a ssDNA tether (19202) or a RNA tether (19203). In some embodiments, the nucleic acid tether may comprise a mixture of DNA and RNA.

[0620] FIG. 192B shows an exemplary signal generation strategy utilizing a reporter (19208) comprising an enzyme (19204) and a nucleic acid tether (19210), wherein the nucleic acid tether immobilizes the reporter to a surface (19200). The first panel from the left shows a programmable nuclease complex, comprising a programmable nuclease (19206) with a guide nucleic acid (19209), and a target nucleic acid (19205) prior to encountering the reporter immobilized to the surface. Upon binding of a target nucleic acid to the programmable nuclease complex, the programmable nuclease may be activated and may cleave the nucleic acid tether of the reporter, thereby releasing the enzyme into solution. In some embodiments, an enzyme substrate (19207) may be added to the solution after the enzyme is cleaved off the reporter, as shown in the last panel from the left. In some embodiments, the solution (or supernatant) containing the released enzyme can be separated and added to a solution comprising an enzyme substrate (19207) upon which the enzyme (19204) can act to produce a detectable signal in the solution. FIG. 204 illustrates an alternative method in which the reporters comprise the linker and functionality for immobilization, but are free in solution at the time of exposure to the programmable nuclease. In the presence of a target nucleic acid, an activated programmable nuclease complex cleaves the reporter, separating the enzyme from the functionality. The reaction is then contacted with beads reactive with the functionality, leaving only released enzyme (if present) in the solution. The solution is then separated from the beads, and exposed to a substrate of the enzyme. If enzyme is present (resulting from cleavage of the reporter in response to presence of the target nucleic acid), that enzyme reacts with its substrate to produce a detectable signal. Without wishing to be bound by theory, reporters that are unbound in solution may be more accessible to activated programmable nuclease, while inclusion of the functionality for immobilization still provides the benefits of surface-bound reagents in later steps. Where reporters are surface-immobilized at the beginning of the reaction, longer linkers may be used to increase accessibility by the activated programmable nuclease.

[0621] In some embodiments, the method may comprise (a) providing a solution comprising a target nucleic acid, a programmable nuclease complex configured to bind to the target nucleic acid, and a reporter comprising an enzyme immobilized on a surface, and (b) adding an enzyme substrate configured to be acted on by the enzyme to induce color change of the solution.

[0622] In some embodiments, the method may comprise (a) providing a solution comprising a programmable nuclease complex configured to bind to a target nucleic acid and a reporter comprising an enzyme immobilized on a surface, and (b) adding the target nucleic acid and an enzyme substrate configured to be acted on by the enzyme to induce color change of the solution.

[0623] In some embodiments, the method may comprise (a) providing a solution comprising a target nucleic acid and a reporter comprising an enzyme immobilized on a surface, and (b) adding a programmable nuclease complex configured to bind to the target nucleic acid and an enzyme substrate configured to be acted on by the enzyme to induce color change of the solution.

[0624] In some embodiments, the method may comprise (a) providing a solution comprising a target nucleic acid and a programmable nuclease complex configured to bind to the target nucleic acid, and (b) adding a reporter comprising an enzyme immobilized on a surface and an enzyme substrate configured to be acted on by the enzyme to induce color change of the solution.

[0625] In some embodiments, the method may comprise (a) providing a solution comprising a reporter comprising an enzyme immobilized on a surface, and (b) adding a target nucleic acid, a programmable nuclease complex configured to bind to the target nucleic acid, and an enzyme substrate configured to be acted on by the enzyme to induce color change of the solution.

[0626] In some embodiments, the method may comprise (a) providing a solution comprising a target nucleic acid, a programmable nuclease complex configured to bind to the target nucleic acid, and an enzyme substrate configured to be acted on by an enzyme to induce color change of the solution, and (b) adding reporter comprising the enzyme immobilized on one or more surfaces.

[0627] In some embodiments, the method may comprise (a) providing a solution comprising programmable nuclease complex configured to bind to a target nucleic acid and an enzyme substrate configured to be acted on by an enzyme to induce color change of the solution, and (b) adding the target nucleic acid and a reporter comprising the enzyme immobilized on one or more surfaces.

[0628] In some embodiments, the method may comprise (a) providing a solution comprising a target nucleic acid and an enzyme substrate configured to be acted on by an enzyme to induce color change of the solution, and (b) adding a programmable nuclease complex configured to bind to the target nucleic acid and a reporter comprising the enzyme immobilized on one or more surfaces.

[0629] In some embodiments, the method may comprise (a) providing a solution comprising substrates configured to be acted on by an enzyme to induce color change of the solution, and (b) adding a target nucleic acid, a programmable nuclease complex configured to bind to the target nucleic acid, and a reporter comprising the enzyme immobilized on one or more surfaces.

[0630] In some embodiments, the reporter may comprise any of the reporters disclosed herein. In some embodiments, the programmable nuclease may comprise any one of the programmable nucleases disclosed herein. In some embodiments, the nucleic acid tether may comprise any of the nucleic acid tethers disclosed herein.

[0631] The nucleic acid tether of the reporter may be attached to, bound to, coupled to, or otherwise immobilized on the surface using any of the immobilization chemistries or linkages described herein. In some embodiments, the immobilization chemistry or linkage may be between: streptavidin and biotin; an amine group and N-hydroxysuccinimide (NHS), an amine group and an epoxy group, or a malemide group and a thiol group.

[0632] In some embodiments, the surface may be any surface disclosed herein. In some embodiments the surface may be of a support as described herein. In some embodiments, the support may comprise glass, PDMS, a hydrogel, plastic, magnetic beads, agarose beads, nitrocellulose, or any other support whose surface can be modified to bind nucleic acids. In some embodiments, the surface of the support, or of a reaction chamber, comprises streptavidin, biotin, an amine group, a carboxyl group, an epoxy group, an NHS group, a malemide group, or a thiol group. In some embodiments, the target nucleic acid may be any target nucleic acid disclosed herein. In some embodiments, the target nucleic acid may be a single-stranded DNA, a single-stranded RNA, a double-stranded DNA, a double-stranded RNA, or a double-stranded DNA/RNA hybrid.

[0633] In some embodiments, the guide nucleic acid may be any guide nucleic acid disclosed herein. In some embodiments, the guide nucleic acid may be a single-stranded DNA or a single-stranded RNA. In some embodiments, the nucleic acid tethering the reporter may comprise any of the reporter nucleic acids described herein.

[0634] In some embodiments, the enzyme may be HRP, AP, beta-galactosidase, acetylcholinesterase, catalase, catacolase, tyronase, nitrocefelin, alkaline phosphatase, or invertase. In some embodiments, the enzyme may be any one of the enzymes described herein.

[0635] In some embodiments, the enzyme may bind with an enzyme substrate and produce a detectable signal. In some embodiments, the enzyme substrate may be 3,3′,5,5′-tetramethylbenzidine (TMB), 2,2′-Azinobis [3-ethylbenzothiazoline-6-sulfonic acid]-diammonium salt (ABTS), o-phenylenediamine dihydrochloride (OPD), p-Nitrophenyl Phosphate (PNPP), o-nitrophenyl-β-D-galactopyranoside (ONPG), 3,3′-diaminobenzidine (DAB), p-hydroxyphenylacetic acid, 3-(p-hydroxyphenyl)-propionic acid, homovanillic acid, or o-aminophenol. In some embodiments, the enzyme substrate may be a commercial enzyme substrate including SuperSignal ELISA Pico, SuperSignal Elisa Femto, CDP-Star Substrate, CSPD Substrate, DynaLight Substrate with RapidGlow Enhancer, QuantaBlu, QuantaRed, or Amplex.

[0636] In some embodiments, the enzyme may generate a colorimetric signal, a fluorescent signal, an electrochemical signal, a chemiluminescent signal, or another type of signal. In some embodiments, the enzyme may induce color-change in substances.

[0637] FIGS. 193A-193C show a signal generation and amplification strategy involving the release of a programmable nuclease-enzyme fusion protein comprising a programmable nuclease and an enzyme. Presence of a target nucleic acid may activate the programmable nuclease of the programmable nuclease-enzyme fusion protein, wherein the activated programmable nuclease may cleave a nucleic acid tether that immobilizes the programmable nuclease-enzyme fusion protein on a surface. Cleaving the nucleic acid tether may release the programmable nuclease-enzyme fusion protein into solution, wherein the enzyme of the programmable nuclease-enzyme fusion protein may be contacted with an enzyme substrate to create a detectable and amplified signal.

[0638] FIG. 193A shows two exemplary embodiments of a programmable nuclease-enzyme fusion protein comprising (i) an enzyme portion and (ii) a programmable nuclease portion complexed with a guide nucleic acid. In some embodiments, the programmable nuclease-enzyme fusion protein may be complexed with a guide nucleic acid (19309) tethered or immobilized to a surface (19303) as described herein. In some embodiments, the guide nucleic acid may be immobilized to the surface with a ssDNA tether (19304). In some embodiments, the guide nucleic acid may be immobilized to the surface with an RNA tether (19305).

[0639] In some embodiments, the programmable nuclease of the programmable nuclease-enzyme fusion protein may be Cas12, Cas13, Cas14, or CasPhi. In some embodiments, the programmable nuclease of the programmable nuclease-enzyme fusion protein may be any programmable nuclease disclosed herein.

[0640] In some embodiments, the enzyme of the programmable nuclease-enzyme fusion protein may be HRP, AP, beta-galactosidase, acetylcholinesterase, or catalase. In some embodiments, the enzyme of the programmable nuclease-enzyme fusion protein may be any enzyme disclosed herein.

[0641] In some embodiments, the programmable nuclease may be fused by a peptide linker to the enzyme. In some embodiments, the C-terminus of the programmable nuclease portion may be fused by a peptide linker to the N-terminus of the enzyme. In some embodiments, the N-terminus of the programmable nuclease portion may be fused by a peptide linker to the C-terminus of the enzyme. In some embodiments, the peptide linker may be XTEN.

[0642] FIG. 193B shows an example procedure using a programmable nuclease-enzyme fusion protein comprising (i) an enzyme and (ii) a programmable nuclease complexed with a guide nucleic acid. In some embodiments, a target nucleic acid (19306) may be added to a solution comprising the programmable nuclease-enzyme fusion protein bound to an immobilized guide nucleic acid. The target nucleic acid may bind with the programmable nuclease-enzyme fusion protein on the surface of a detection location (19308) and activate the trans-cleavage activity of the programmable nuclease of the programmable nuclease-enzyme fusion protein. The activated programmable nuclease may then cleave the nucleic acid tether (e.g., a ssDNA tether or a RNA tether) and release the programmable nuclease-enzyme fusion protein into solution (in a manner analogous to release of a detection moiety from a reporter as described herein). The solution (or the supernatant) comprising the released programmable nuclease-enzyme fusion protein can be added to a second solution comprising an enzyme substrate (19307) which can be acted upon by the enzyme of the programmable nuclease-enzyme fusion protein to produce a detectable signal as described herein (e.g., to induce a color change of the second solution) as shown in FIG. 193C.

[0643] In some embodiments, the method may comprise (a) providing a solution comprising an enzyme substrate and a programmable nuclease-enzyme fusion protein immobilized on a surface, wherein the programmable nuclease-enzyme fusion protein comprises a programmable nuclease and an enzyme, wherein the programmable nuclease is configured to bind to a target nucleic acid, and (b) adding the target nucleic acid.

[0644] In some embodiments, the method may comprise (a) providing a solution comprising an enzyme substrate and a target nucleic acid, and (b) adding a programmable nuclease-enzyme fusion protein immobilized on a surface, wherein the programmable nuclease-enzyme fusion protein comprises a programmable nuclease and an enzyme, wherein the programmable nuclease is configured to bind to a target nucleic acid.

[0645] In some embodiments, the programmable nuclease-enzyme fusion protein may comprise any one of the programmable nucleases disclosed herein. In some embodiments, the target nucleic acid may be any one of the target nucleic acids disclosed herein. In some embodiments, the guide nucleic acid may comprise any one of the guide nucleic acids disclosed herein. In some embodiments, the nucleic acid tethering the guide nucleic acid to the surface may comprise any of the reporter nucleic acids described herein. In some embodiments, the programmable nuclease-enzyme fusion protein may comprise any of the enzymes described herein.

[0646] FIG. 194 shows an exemplary signal generation strategy utilizing a split-enzyme based assay strategy. A first programmable nuclease-split enzyme fusion protein (19402) may comprise a first catalytically inactive programmable nuclease (19403), e.g., a first dead Cas (dCas) protein, fused to a first subunit (19404) of a split enzyme. A second programmable nuclease-split enzyme fusion protein (19406) may comprise a second catalytically inactive programmable nuclease (19407), e.g., a second dead Cas (dCas) protein, fused to a second subunit (19408) of the split enzyme. The first catalytically inactive programmable nuclease (19403) may be complexed to a first guide nucleic acid (19405) configured to bind to a first portion or sequence (19410) of a target nucleic acid. The second catalytically inactive programmable nuclease (19407) may be complexed to a second guide nucleic acid (19409) configured to bind to a second portion or sequence (19411) of a target nucleic acid. The first portion (19410) and the second portion (19411) of the target nucleic acid may be sufficiently close to bring the first subunit (19404) and the second subunit (19408) of the split enzyme together to form a functional enzyme (19414). Once activated, the functional enzyme (19414) may act upon an enzyme substrate (19413) to generate a detectable signal as described herein.

[0647] In some embodiments, a catalytically inactive programmable nuclease may have no substantial nucleic acid-cleaving activity. In some embodiments, a catalytically inactive programmable nuclease may be catalytically inactive or “dead,” that is, they may bind to a target nucleic acid but not cleave the target nucleic acid. A catalytically inactive or dead programmable nuclease may comprise a catalytically inactive domain (e.g., inactive nuclease domain). In some instances, a catalytically inactive domain may comprise at least 1, at least 2, at least 3, at least 4, or at least 5 mutations relative to an active domain of a catalytically active programmable nuclease. In some instances, the mutations may be present within a cleaving or active site of the programmable nuclease. In some instances, a catalytically inactive or dead programmable nuclease is fused to a fusion partner. In some instances, catalytically inactive may refer to an activity less than 1%, less than 2%, less than 3%, less than 4%, less than 5%, less than 6%, less than 7%, less than 8%, less than 9%, or less than 10% activity compared to a wild-type counterpart of the programmable nuclease.

[0648] In an exemplary embodiment, a target nucleic acid (19401) may bind with a programmable nuclease-split enzyme fusion protein comprising a dCas protein, an “S” subunit of a split HRP protein, and a first guide nucleic acid. In some embodiments, the dCas protein is not capable of cis or trans cleavage. The target nucleic acid (19402) may also bind with another programmable nuclease-split enzyme fusion protein (19406) comprising a dCas protein (19407), an “L” subunit of a split HRP protein (19408), and a second guide nucleic acid (19409). The first guide nucleic acid (19402) may be configured to target a first portion (19410) of the target nucleic sequence. The second guide nucleic acid (19409) may be configured to target a second portion (19411) of the target nucleic acid sequence, wherein the second portion is sufficiently close to the first portion such that the “S” subunit of the HRP (19404) and the “L” subunit of the HRP (19408) can dock together to form an activated HRP protein (19412). The activated HRP protein (19412) then may act on an enzyme substrate (19413) in solution to induce a color change.

[0649] In some embodiments, the programmable nuclease-split enzyme fusion protein may comprise any one of the programmable nucleases disclosed herein. In some embodiments, the target nucleic acid may be any one of the target nucleic acids disclosed herein. In some embodiments, the guide nucleic acids may comprise any of the guide nucleic acids disclosed herein. In some embodiments, the programmable nuclease-split enzyme fusion protein may comprise any of the enzymes described herein in split form.

[0650] FIG. 202 shows a schematic of a signal amplification strategy involving downstream activation of an endonuclease (e.g., NucC, Csm6, etc.) following activation of a programmable nuclease (e.g., any of the programmable nucleases described herein) in response to a target nucleic acid. The programmable nuclease may be configured to cleave a first reporter comprising a first nucleic acid section and a second nucleic acid section. The first nucleic acid section may act as an activator for the endonuclease when separated from the second nucleic acid section. The second nucleic acid section may act as a blocker nucleic acid and prevent the first nucleic acid from binding to and/or activating the endonuclease. Presence of the target nucleic acid may activate the programmable nuclease, which may cleave the first nucleic acid section from the second nucleic acid section, thereby freeing the first nucleic acid section to bind to and activate the endonuclease. The activated endonuclease may then cleave the second reporter and release a detection moiety where may be detected as described herein.

[0651] In one aspect, the present disclosure provides a composition for detecting a target nucleic acid, in which the composition comprises a programmable nuclease, a guide nucleic acid, a first reporter, an enzyme, and a second reporter. In some embodiments, (a) the guide nucleic acid is configured to bind to the target nucleic acid; (b) the programmable nuclease is effective to cleave the first reporter in response to formation of a complex comprising the programmable nuclease, the guide nucleic acid, and the target nucleic acid; (c) the cleavage of the first reporter is effective to separate a first nucleic acid section from a second nucleic acid section thereof; (d) the first nucleic acid section is effective to activate the enzyme; and (e) the activated enzyme is effective to cleave the second reporter to produce a detectable product comprising a detection moiety. In some embodiments, the programmable nuclease is a Cas protein or fragment thereof. In some embodiments, the programmable nuclease is a Cas13. In some embodiments, the programmable nuclease is a Cas13a. In some embodiments, the programmable nuclease is a Cas13c. In some embodiments, the programmable nuclease is thermostable at elevated temperatures. In some embodiments, the enzyme is an endonuclease and the second reporter comprises a polynucleotide substrate of the enzyme. In some embodiments, the endonuclease is a NucC endonuclease. In some embodiments, the first nucleic acid section comprises adenosine residues (such as cyclic adenylate) effective to activate the NucC. In some embodiments, the second nucleic acid section comprises RNA residues, optionally wherein the RNA residues comprise a plurality of uracil residues (e.g., at least 4, 5, 6, 7, 8, 9 or 10 RNA residues, such as uracils). In some embodiments, the second nucleic acid section comprises DNA residues, optionally wherein the DNA residues comprise a plurality of thymine residues (e.g., at least 4, 5, 6, 7, 8, 9 or 10 DNA residues, such as thymines). In some embodiments, (a) the second reporter comprises a fluorescent label and a quencher, and (b) cleavage of the second reporter by the activated enzyme is effective to separate the fluorescent label from the quencher.

[0652] In some embodiments, such as when the endonuclease is NucC, the first reporter may comprise a first nucleic acid section comprising a plurality of adenosine residues and a second nucleic acid section comprising a plurality of uracil residues. In some embodiments, one or more of the plurality of adenosine residues may be modified (e.g., fluoro-adenosine, etc.) as described herein. When the target nucleic acid is a target RNA, the programmable nuclease may comprise a Cas13 nuclease which, when activated by the target RNA, may preferentially cleave the uracil residues off of the first reporter and release the first nucleic acid section comprising the adenosine residues. NucC is naturally activated by cyclic adenylate (cA3) and cleaves double-stranded DNA, thus in an exemplary embodiment the plurality of adenosine residues may be at least two or three adenosine residues and the second reporter may comprise a detection moiety (e.g., a fluorophore) and a nucleic acid comprising double-stranded DNA. In some embodiments, the second reporter may comprise a detection moiety (e.g., a fluorophore) and a quencher moiety. Cleavage of the second reporter may separate the detection moiety from the quencher moiety and generate a detectable signal as described herein.

[0653] In some embodiments, such as when the endonuclease is NucC, the composition for detecting the target nucleic acid and the target nucleic acid are reacted and analyzed at room temperature. In some embodiments, the composition for detecting the target nucleic acid and the target nucleic acid are reacted and analyzed at an elevated temperature. In some embodiments, the elevated temperature is a temperature selected from: 40° C., 45° C., 50° C., 55° C., 60° C., or 65° C.

[0654] In various aspects, provided herein are methods for detecting a target nucleic acid in a sample, the methods comprising contacting the sample with a composition, device, or system described herein. In an embodiment, the method comprises (a) contacting the sample with composition described herein; (b) cleaving the first reporter with the programmable nuclease in response to formation of the complex comprising the programmable nuclease, the guide nucleic acid, and the target nucleic acid, thereby releasing the first nucleic acid section; (c) activating the enzyme with the first nucleic acid section; (d) cleaving the second reporter with the activated enzyme, thereby producing the detectable product comprising the detection moiety; and; and (e) detecting the detection moiety, thereby detecting the presence of the target nucleic acid in the sample.

### Enzyme-Based Reporters for DETECTR Signal Enhancement

[0655] Described herein are various compositions, devices, and methods for detecting a target nucleic acid, utilizing a DETECTR assay as described herein. In some embodiments, the DETECTR assay utilizes reporters comprising one or more detection moieties. One or more of the detection moieties may comprise an enzyme configured for assay signal enhancement as described herein. In some embodiments, the enzyme is horseradish peroxidase (HRP). In some embodiments, enzyme-modified reporters may be immobilized to a surface and configured to release the enzyme upon cleavage of a nucleic acid of the reporter by an activated programmable nuclease-guide complex bound to a target nucleic acid as described herein. In some embodiments, one or more enzymes are conjugated to a linker, the comprises one or more nucleic acid sections, and the linker comprises a functionality for immobilization to a support (but is not immobilized to the support at the time of cleavage by an activated programmable nuclease). In some embodiments, the reporters may comprise two or more enzymes configured for signal enhancement. In some embodiments, a reporter comprising two or more enzymes configured for signal enhancement is referred to as a poly-enzyme reporter. In some embodiments, each of the two or more enzymes configured for signal enhancement are HRP. In some embodiments, wherein the two or more enzymes configured for signal enhancement are each HRP, the reporter is referred to as a poly-HRP reporter.

[0656] Described herein are various devices for detecting a target nucleic acid, comprising: a sample interface configured to receive a sample comprising the target nucleic acid; a first reaction chamber in fluid communication with the sample interface, wherein the first reaction chamber comprises a plurality of reporters, each reporter of the plurality comprising two or more enzymes; and a surface of the first reaction chamber, wherein each reporter of the plurality of reporters is immobilized to the surface of the first reaction chamber via a nucleic acid (which may comprise or be a part of a linker or tether as described herein), and a second reaction chamber in fluid communication with the first reaction chamber, wherein the second reaction chamber comprises an enzyme substrate, and wherein cleaving the nucleic acid of the reporter by a programmable nuclease complexed with a guide nucleic acid, the guide nucleic acid being configured to bind to the target nucleic acid, may release the two or more enzymes into solution, and wherein each enzyme of the two or more enzymes may be contacted with the enzyme substrate in the second reaction chamber to generate a detectable and amplified signal indicative of a presence or absence of the target nucleic acid in the sample. In some embodiments, each enzyme of the two or more enzymes comprises HRP. In some embodiments, the reporter comprises a detection moiety comprising a streptavidin conjugated to the two or more enzymes. In some embodiments, the nucleic acid of the reporter may be immobilized to the surface via a functionality (e.g., a biotin, an acrydite, an amine, or the like) as described herein. In some embodiments, the surface of the first reaction chamber may be functionalized with a corresponding functionality (e.g., a hydrogel, carboxyl group, NHS groups, or like) as described herein. In some embodiments, the tether comprises a segment(s) of cleavable DNA, cleavable RNA, or a combination thereof. In some embodiments, the tether comprises a segment(s) of non-cleavable DNA, non-cleavable RNA, or a combination thereof. In some embodiments, the enzyme comprises HRP and the enzyme substrate comprises 3,3′,5,5′-tetramethylbenzidine (TMB). In some embodiments, the surface of the first reaction chamber comprises the inner wall of the first reaction chamber. In some embodiments, the surface of the first reaction chamber comprises a surface of a bead, wherein the bead is contained within the first reaction chamber. In some embodiments, the bead is a magnetic bead.

[0657] Described herein are various devices and methods for detecting a target nucleic acid, utilizing a DETECTR assay as described herein. In some embodiments, the DETECTR assay utilizes reporters comprising a detection moiety comprising an enzyme configured for assay signal enhancement as described herein. Non-limiting examples of enzymes for assay signal enhancement include horseradish peroxidase (HRP), alkaline phosphatase, beta-galactosidase, catacholase, invertase, glucose, beta-lactamase, luciferase, and complexes comprising two or more thereof (e.g., two or more of the same enzyme, or two or more different enzymes). In some embodiments, the enzyme is HRP. In some embodiments, the enzyme is a poly-HRP. In some embodiments, enzyme-modified reporters may be immobilized to a surface and configured to release the enzyme upon cleavage of a nucleic acid of the reporter by an activated programmable nuclease-guide complex bound to a target nucleic acid as described herein. In some embodiments, the reporters comprise two or more enzymes configured for signal enhancement. In some embodiments, the incorporation of the two or more enzymes configured for signal enhancement may provide for assay signal enhancement upon a single cleavage event of the reporter induced by the activated programmable nuclease. In some embodiments, the two or more enzymes comprise a group, wherein the group further comprises a protein. In some embodiments, the two or more enzymes comprise a group, wherein the group further comprises a protein, the protein comprising streptavidin (SA). In some embodiments, the group comprises two or more HRP. In some embodiments, the group comprising two or more enzymes is attached to the nucleic acid of the reporter via a Biotin-Streptavidin interaction (e.g., as shown in FIG. 195E).

[0658] In some embodiments, the reporter comprises a linker (also referred to herein as a tether). In some embodiments, the linker comprises one or more linker-sections. In some embodiments, the one or more linker sections comprises a cleavable section comprising one or more nucleic acids which may be cleaved by an activated programmable nuclease as described herein. In some embodiments, the one or more linker sections comprises cleavable and non-cleavable section, the non-cleavable section comprising one or more nucleic acids, carbon spacers, or other molecules which may not be cleaved by an activated programmable nuclease. For example, FIG. 195B shows an exemplary reporter comprising a linker comprising a carbon spacer, a first linker section comprising a first plurality of thymines (T12 (SEQ ID NO: 127)), a second linker section comprising a plurality of uracils (UUUUU), and a third linker section comprising a second plurality of thymines (T12 (SEQ ID NO: 127)). The carbon spacer may be uncleavable by the programmable nuclease. When the programmable nuclease is a DNA-targeting programmable nuclease, the first and second pluralities of thymines may be cleavable linker sections and the plurality of uracils may be a non-cleavable linker section. When the programmable nuclease is an RNA-targeting programmable nuclease, the first and second pluralities of thymines may be non-cleavable linker sections and the plurality of uracils may be a cleavable linker section.

[0659] In some embodiments, the linker comprises one or more nucleic acid sections, and the only nucleic acids in the linker consist of DNA. In some embodiments, the linker comprises one or more nucleic acid sections, and the only nucleic acids in the linker consist of RNA. In some embodiments, the linker comprises one or more sections of DNA and one or more sections of RNA (e.g., one section of each, one section of RNA between two sections of DNA, one section of DNA between two sections of RNA, or greater numbers of each). In linkers comprising DNA and RNA, the DNA and RNA may be linked (e.g., covalently linked) directly to one another, or separated by one or more intervening molecules or linkages to which both the DNA and RNA are linked (e.g., covalently linked). The type, length, and arrangement of the one or more nucleic acid sections can be selected based on the programmable nuclease(s) to be used. In some embodiments, one or more DNA sections comprise one or more poly-T sections consisting of 2, 3, 4, 5, 6, 7, 8, 9, 10, 11, 12, 13, 14, 15, 20, 25, 30, or more contiguous thymine nucleotides. In some embodiments, the poly-T section consists of 12 contiguous thymine nucleotides (T12) (SEQ ID NO: 127). In some embodiments, the poly-T section consists of 20 contiguous thymine nucleotides (T20) (SEQ ID NO: 126). In a linker comprising two or more poly-T sections, the poly-T sections may be of the same or different lengths (e.g., two of T12 (“T12” disclosed as SEQ ID NO: 127), a T12 (SEQ ID NO: 127) and a T20 (SEQ ID NO: 126), etc.). In some embodiments, one or more RNA sections comprise one or more poly-U sections consisting of 2, 3, 4, 5, 6, 7, 8, 9, 10, 11, 12, 13, 14, 15, 20, 25, 30, or more contiguous uracil nucleotides. In some embodiments, the poly-U section consists of 5 contiguous uracil nucleotides (UUUUU). In a linker comprising two or more poly-U sections, the poly-U sections may be of the same or different lengths (e.g., two of UUUUU, a UUUUU and a U8, etc.) In some embodiments, the RNA section is about or less than about 20, 15, 10, or 5 nucleotides in length. In some embodiments, a linker includes only one RNA section of fewer than 20 nucleotides (e.g., about 5 nucleotides) and is adjusted to a desired length by the inclusion of one or more DNA sections (e.g., at one end or at each end). In some embodiments, the desired length adjustment is the length of 24 DNA nucleotides (e.g., as in two T12 (“T12” disclosed as SEQ ID NO: 127) sections), 40 nucleotides (e.g., as in two T20 (“T20” disclosed as SEQ ID NO: 126) sections), a length intermediate to these (e.g., a T12 (SEQ ID NO: 127) and a T20 (SEQ ID NO: 126)), or another length as specified herein. In some embodiments, the length is adjusted to a combined length of at least about 20, 30, 40, 50, 75, 100, or 200 nucleotides. In some embodiments, the length is adjusted to a combined length of about 10 to 200 nucleotides, 20 to 100 nucleotides, or 25 to 75 nucleotides. In some embodiments, the length is adjusted to a combined length of at least about 20, 30, 40, or 50 nucleotides. In some embodiments, the length is adjusted to a combined length of at least about 30 nucleotides. In some embodiments, the one or more nucleic acid sections are single-stranded.

[0660] In some embodiments, the one or more linker sections comprise at least one hydrocarbon chain. In some embodiments, the one or more hydrocarbon chains comprise a linear chain of 2, 3, 4, 5, 6, 7, 8, 9, 10, 20, 50, 75 or more carbons. In some embodiments, a hydrocarbon chain comprises one or more units (e.g., 2, 3, 4, 5, or more units) of an 18-carbon chain. In some embodiments the hydrocarbon chain is a chain of 4 carbons (C₄H₈). In some embodiments the hydrocarbon chain is a chain of 8 carbons (C₈H₁₆). In some embodiments, the hydrocarbon chain is a chain of at least 36 carbons. In some embodiments, the hydrocarbon chain is a chain of at least 54-carbon chain. In a linker comprising two or more hydrocarbon chains, the hydrocarbon chains can be chains of the same or different lengths (e.g., two chains of 4 carbons, a chain of 4 carbons and a chain of 8 carbons, a chain of 36 carbons and a chain of 54 carbons, etc.). In some embodiments of a linker comprising two hydrocarbon chains separated by one or more nucleic acid sections, the two hydrocarbon chains have a combine length of about or at least about 30, 50, 75, 100, or more carbons. In some embodiments, the combined chain length is at least 75 carbons. In some embodiments, a hydrocarbon chain is located at one or more of (i) between a nucleic acid section of a linker and a solid support to which the linker is attached, (ii) between a nucleic acid section of a linker and an enzyme for signal enhancement (e.g., an HRP or poly-HRP), or (iii) between two nucleic acid sections of the same or different type. In some embodiments, the linker comprises a single nucleic acid section (e.g., an RNA section) with a hydrocarbon chain at both ends, one joining the nucleic acid section to the support at one end, and the other joining the nucleic acid section to the enzyme at the other end. In some embodiments, a linker includes only one RNA section of fewer than 20 nucleotides (e.g., about 5 nucleotides) and is adjusted to a desired length by the inclusion of one or more hydrocarbon chains (e.g., at one end or at each end). In some embodiments one or more hydrocarbon chains and one or more DNA sections are used to adjust the linker length.

[0661] In some embodiments, the reporter may comprise a functionality for binding to a solid support as described herein. In some embodiments, the reporter may comprise a functionality for binding to a surface of a solid support as described herein. In some embodiments, the surface may comprise a surface of a chamber, the surface of a particle, a bead, a polymer matrix, or other scaffold as described herein. In some embodiments, the functionality may comprise a biotin, an acrydite, an amine, or the like, or a combination thereof, as described herein. FIGS. 195A-195E show various non-limiting examples of reporters, each comprising at least one enzyme for signal enhancement of the DETECTR assay. FIG. 195A shows a reporter, rep161, comprising an HRP enzyme for signal enhancement, a T20 linker (SEQ ID NO: 126) segment, and a biotin for immobilization to a support, as described herein. FIG. 195B shows a reporter, rep194, comprising an HRP enzyme for signal enhancement, a T12 (SEQ ID NO: 127) linker segment, a UUUUU linker segment, a second T12 (SEQ ID NO: 127) linker segment and a biotin functionality for immobilization to a support. FIG. 195C shows a reporter, rep188, comprising an HRP enzyme for signal enhancement, a T20 linker (SEQ ID NO: 126) segment and an acrydite functionality for immobilization to a support. FIG. 195D shows a reporter, rep 190, comprising an HRP enzyme for signal enhancement, a T20 linker (SEQ ID NO: 126) segment, a carbon spacer, and an amine functionality for immobilization to a support. FIG. 195E shows a reporter, rep197, comprising an SA Poly-HRP for signal enhancement, a first carbon spacer, a T20 linker (SEQ ID NO: 126) segment, a second carbon spacer, and an amine functionality for immobilization to a support.

[0662] Table 4 describes reporters as shown in FIG. 195.

| Reporter | |
|---|---|
| Name | Description |
| rep161 | HRP-[T20]-biotin (SEQ ID NO: 1498) |
| rep194 | HRP-[T12]-UUUUU-[T12]-[C₄H₈]-biotin (SEQ ID NO: 1499) |
| rep188 | HRP-[T20]-acrydite (SEQ ID NO: 1500) |
| rep190 | HRP-[T20]-[C₄H₈]-amine (SEQ ID NO: 1501) |
| rep197 | Streptavidin-poly-HRP-biotin-[C₈H₁₆]-[T20]-[C₄H₈]-amine |
| | (SEQ ID NO: 1502) |

[0663] FIG. 196 shows a non-limiting example of a reporter comprising a streptavidin-based poly-HRP detection moiety coupled to a carboxyl-functionalized magnetic bead. The multiple HRP units released per trans-cleavage event is designed to increase signal intensity indicative of activation of the programmable nuclease. In general, the term “poly-HRP” is used to refer to a plurality of HRP enzymes complexed to one another by interactions with one or more complexing molecules. Typically, the complexing molecule is streptavidin. Illustrations of poly-HRP, such as in the figures, are simplified for illustrative purposes. The term “poly-HRP” does not require any particular stoichiometry or arrangement of molecules within the complex. A variety of suitable poly-HRP complexes are commercially available.

[0664] In some embodiments, the reporter may be immobilized onto a solid support as described herein. In some embodiments, the reporter may be a poly-enzyme reporter. In some embodiments, one or more of the poly-enzymes of the reporter may be HRP. In some embodiments, the poly-HRP reporter may be immobilized to a bead functionalized with a functionality such as streptavidin. A variety of suitable beads are available, non-limiting examples of which include DYNABEADS MYONE carboxylic acid magnetic beads (1 μm diameter), 1 μm PIERCE streptavidin magnetic beads, 4.5 μm DYNABEADS epoxy magnetic beads, 2.7 μm DYNABEADS epoxy magnetic beads, and 1 μm PIERCE NHS-activated magnetic beads. In some embodiments, during reporter immobilization onto beads functionalized with streptavidin, the reporter may be present at a concentration of about 0.1 nM to about 1,000 nM, for example within a range of about 0.1 nM to about 10 nM. In some embodiments, during reporter immobilization, the reporter is present at a concentration of about 0.1 nM to about 1 nM, about 0.1 nM to about 10 nM, about 0.1 nM to about 100 nM, about 0.1 nM to about 250 nM, about 0.1 nM to about 500 nM, about 0.1 nM to about 1,000 nM, about 1 nM to about 10 nM, about 1 nM to about 100 nM, about 1 nM to about 250 nM, about 1 nM to about 500 nM, about 1 nM to about 1,000 nM, about 10 nM to about 100 nM, about 10 nM to about 250 nM, about 10 nM to about 500 nM, about 10 nM to about 1,000 nM, about 100 nM to about 250 nM, about 100 nM to about 500 nM, about 100 nM to about 1,000 nM, about 250 nM to about 500 nM, about 250 nM to about 1,000 nM, or about 500 nM to about 1,000 nM. In some embodiments, during reporter immobilization, the reporter is present at a concentration of about 0.1 nM, about 1 nM, about 10 nM, about 100 nM, about 250 nM, about 500 nM, or about 1,000 nM. In some embodiments, during reporter immobilization, the reporter is present at a concentration of at least about 0.1 nM, about 1 nM, about 10 nM, about 100 nM, about 250 nM, or about 500 nM. In some embodiments, during reporter immobilization, the reporter is present at a concentration of at most about 1 nM, about 10 nM, about 100 nM, about 250 nM, about 500 nM, or about 1,000 nM.

[0665] FIGS. 197A-197E show an illustrative programmable nuclease-based detection (e.g., DETECTR) assay scheme utilizing reporters comprising an enzyme-based detection moiety as well as assay results showing clear differentiation between target and non-target containing samples. FIG. 197A shows a schematic of an exemplary immobilized HRP-based reporter on a streptavidin bead being cleaved by an activated programmable nuclease, a Cas13 variant (SEQ ID NO: 21) in this case, thereby generating a visual signal upon introduction of an HRP-substrate such as 3,3′,5,5′-tetramethylbenzidine (TMB) as described herein. FIGS. 197B-197D show absorbance vs time plots for three reactions, where reporters were immobilized onto 10 μL of streptavidin-functionalized beads at reporter concentrations of 500 nM, 250 nM, and 1 nM, respectively. After running the DETECTR reaction, the beads were immobilized and the supernatant was added to the HRP-substrate TMG before absorbance at 450 nm was measured. In each of the three cases, the top trace shows 450 nm absorbance values for when the target was present at a concentration of 4 nM. The bottom trace shows absorbance values for the no target control (NTC). The maximum absorbance signal under the conditions tested can be observed in FIG. 197C, where the reporter was immobilized at 250 nM. FIG. 197E shows absorbance versus time when 250 nM of reporter was used to generate the streptavidin beads and the target concentration was varied from 0 to 350 μM in concentration. Each reporter molecule included a single HRP enzyme, a linker, and a biotin functionality for conjugation to a bead. Bead preparation allowed for conjugation of multiple reporters to a single bead. The beads were magnetic beads to facilitate separation of supernatant and un-cleaved reporters. Under these assay conditions, the limit of detection (LOD) was estimated to be at least about 700 fM.

[0666] FIGS. 198A-198E show results for a study involving effects of different concentrations of reporter functionalized to a streptavidin-coated plate, and measurements to determine the limit of detection. FIGS. 198A-198C show the effects of varying the reporter concentration functionalized to a streptavidin-coated plate. The DETECTR assay performed was substantially the same as that of FIGS. 197A-197E, but with the reporter immobilized to a streptavidin-coated plate instead of a magnetic bead. The top trace depicts absorbance values for when target is present at 10 μM. The bottom trace depicts absorbance values for when target is not present, or no target control (NTC). FIG. 198D shows the results of a study where the target concentration was varied from 10 fM to 10 μM. From this data, the limit of detection for the target was determined to be at least 10 μM when 50 nM reporter was bound to the plate under the conditions tested. FIG. 198E shows an image of a multiwell plate corresponding to the data plotted in FIGS. 198A-198C, where the left column shows wells containing 10 PM target and the right column shows wells containing no target. The top row contains 250 nM reporter, the middle row contains 50 nM reporter, and the bottom row contains 5 nM reporter.

[0667] Described herein are various embodiments of DETECTR assays that may utilize hydrogels as a support for reporters, as described herein. In some embodiments, such hydrogels may comprise poly (ethylene glycol) diacrylate, or equivalently PEGDA or PEG-DA. FIGS. 199A-199F show absorbances versus time results for HRP-hydrogels at different PEG-DA concentrations (20% or 35% PEG-diacrylate (MW=700 monomers) with 80% or 65% unfunctionalized PEG (MW=600 monomers) respectively) co-polymerized with different concentrations of reporters (10 uM or 1 uM) comprising HRP-based detection moieties and acrydite functionalities (rep188). The hydrogels served as a solid support for the reporters comprising HRP for signal enhancement. The particular hydrogel constructions of this example is a non-limiting example. Alternative compositions and constructions are provided herein.

[0668] In some embodiments, reporters configured for HRP-reporter-based programmable nuclease-based detection (e.g., DETECTR) assays may be immobilized onto a solid support as described herein. In some embodiments, one or more HRP-conjugated reporters may be immobilized onto a solid support comprising a resin. In some embodiments, one or more HRP-conjugated reporters may be immobilized onto a solid support comprising an activated resin. In some embodiments, one or more HRP-conjugated reporters may be immobilized onto a solid support comprising a resin activated with N-Hydroxysuccinimide (NHS) functionalities. In some embodiments, one or more HRP-conjugated reporters are immobilized onto a solid support comprising a resin activated with NHS functionalities, wherein the reporters comprise corresponding amine functionalities as described herein. In some embodiments, one or more HRP-conjugated reporters are immobilized onto a solid support comprising a resin activated with NHS functionalities, wherein the reporters comprise a protein, for example an enzyme such as HRP. In some embodiments, one or more reporters are configured for HRP-based DETECTR assays and may be immobilized onto one or more solid support comprising a resin activated with NHS functionalities, wherein the reporters comprise an HRP and an amine functionality connected by a linker as described herein. In some embodiments, the resin may comprise agarose.

[0669] FIGS. 200A-200F show a schematic and results for a programmable nuclease-based detection assay utilizing NHS-activated resin as a solid support for an HRP-based reporter for signal enhancement (rep190). FIG. 200A shows a schematic describing the immobilization of an HRP-reporter and an HRP-based detection assay. In FIG. 200A a reporter, 20001, comprising HRP and an amine functionality is immobilized onto the NHS activated resin packed into a 0.2 mL column 20002. The column may then be washed and exposed to programmable-nuclease based detection (e.g., DETECTR) reagents 20004 comprising a programmable nuclease (e.g., SEQ ID NO: 34) complexed with a guide nucleic acid, as described herein. In the last step of FIG. 200A, the eluate, which contains cleaved reporter fragments comprising HRP 20005 when the target is present, may be mixed with a substrate (e.g., TMB) for generation of a detectable signal (e.g., a color change which can be detected by absorbance measurements) as described herein.

[0670] FIG. 200B shows assay results in the form of absorbance (O.D. at 650 nm) versus time, for the assay eluate comprising a substrate and the cleaved HRP-based reporter, rep 190, as described herein. FIGS. 200C-200E show measurements of the eluates from a first wash, a second wash and a third wash, respectively, of the resin packed column. In FIG. 200B, the two top traces show results for the assay carried out with 1 nM target, and the two bottom traces show results for the NEW condition. In FIG. 200C, the NEW condition is represented by the two middle traces. In FIGS. 200D-200E, traces for the two conditions overlapped. Additional details concerning the illustrative assays are described in the examples below.

[0671] In some embodiments, reporters configured for poly enzyme reporter-based DETECTR assays may be immobilized onto solid-supports. In some embodiments, reporters configured for poly HRP reporter-based DETECTR assays may be immobilized onto solid-supports comprising beads. In some embodiments, the beads are functionalized with streptavidin or NHS. In some embodiments, the poly HRP-reporters are immobilized onto the beads at a concentration of about 0.01 nM to about 0.5 μM, such as about 0.1 nM to about 250 nM, about 0.5 nM to about 100 nM, or about 1 nM to about 50 nM. In some embodiments, poly-HRP reporter molecules are immobilized at a concentration of about 10 nM. In some embodiments, mono-HRP reporter molecules are immobilized at a concentration of about 1 nM to about 50 μM, about 10 nM to about 25 μM, about 50 nM to about 10 μM, or about 100 nM to about 5 μM. In some embodiments, mono-HRP reporter molecules are immobilized at a concentration of about 1 μM. In some embodiments, HRP-DETECTR reagents are added to the beads functionalized with reporters, wherein the % solid content (e.g., concentration) of the beads is about 1 to about 50 mg/mL (e.g., about 5 to about 25, or about 10 mg/mL). In some embodiments, the reporter-functionalized beads are used at a concentration of about 10 mg/mL.

[0672] FIGS. 201A-201D show results of a poly-HRP-conjugated reporter-based programmable nuclease-based detection (e.g., DETECTR) assay study utilizing a poly-HRP reporter to determine a limit of detection (LOD) and to study the effect of varying the bead volume and concentration of the target. FIGS. 201A and 201B show absorbance values versus time for a series of target concentrations including 0 nM (NTC), 10 fM, 100 fM, 0.5 μM, 1 μM, 10 μM, 100 μM and 1 nM. Additionally, FIGS. 201A and 201B show DETECTR assay results using 2 μL of poly-HRP-reporter functionalized beads (as shown in FIGS. 196) and 5 μL of poly-HRP-reporter functionalized beads, respectively. In both cases, the concentration of the beads was 10 mg/mL. At the concentrations and amounts used, there were approximately 14×10⁹ reporter molecules per gram of beads. FIGS. 201C and 201D show the same absorbance data with only the 1 μM, 0.5 μM, 100 fM and NTC series. From this data, an LOD of about 100 fM was determined. There were three replicates per condition tested.

[0673] In various aspects, the present disclosure provides methods of using the compositions, devices, and systems disclosed herein to detect a target nucleic acid. In some embodiments, the method comprises (a) contacting the sample with a composition disclosed herein to produce a reaction fluid, wherein (i) the linker is conjugated to the support, (ii) the composition further comprises a guide nucleic acid configured to bind to the target nucleic acid, and (iii) the programmable nuclease cleaves the linker in response to formation of a complex comprising the programmable nuclease, the guide nucleic acid, and the target nucleic acid; (b) separating the reaction fluid from the support; (c) contacting the separated reaction fluid with a substrate of the one or more enzymes, wherein presence of the one or more enzymes in the fluid produces a detectable signal from the enzyme substrate; and (d) detecting the detectable signal. In some embodiments, the method comprises (a) contacting the sample with a composition disclosed herein to produce a reaction fluid, wherein (i) the composition further comprises a programmable nuclease and a guide nucleic acid, (ii) the guide nucleic acid is configured to bind to the target nucleic acid, and (iii) the programmable nuclease cleaves the linker in response to formation of a complex comprising the programmable nuclease, the guide nucleic acid, and the target nucleic acid; (b) contacting the reaction fluid with a plurality of beads, wherein each bead reacts with a plurality of the functionalities, thereby immobilizing the functionalities to the beads; (c) separating the reaction fluid from the beads; (d) contacting the separated reaction fluid with a substrate of the one or more enzymes, wherein presence of the one or more enzymes in the fluid produces a detectable signal from the enzyme substrate; and (e) detecting the detectable signal.

[0674] In some embodiments, the method further comprises concentrating the one or more enzymes prior to contacting the one or more enzymes with the substrate, wherein the concentrating comprises separating the one or more enzymes from at least a portion of the separated reaction fluid. For example, the enzyme may be captured to a support, such as a polymer matrix. The enzyme may be retained on the polymer matrix having a volume smaller than the reaction fluid applied to the matrix, thereby concentrating the enzyme. The enzyme may be reacted with a substrate while complexed to the matrix, or may be eluted in a fluid for subsequent reaction with the substrate. In embodiments where the enzyme is reacted to the substrate while complexed to the matrix, the substrate solutions comprising the substrate may be added serially (e.g., 2, 3, 4, 5, or more times), which may then be combined to detect enzymatic activity. In some embodiments, the enzyme comprises a horseradish peroxidase (HRP).

[0675] In some cases, the reporters are immobilized to the surface by attachment to the non-naturally occurring guide nucleic acid, a linkage immobilizing the guide nucleic acid to a surface, or both. In some instances, at least one of the reporters is immobilized to the surface by attachment to an end of the non-naturally occurring guide nucleic acid that is distal to the linkage. For example, at least one of the reporters can be immobilized by attaching to the 3′ end of a spacer region of the guide nucleic acid. In some cases, at least one of the reporters is immobilized to the surface by attachment to the linkage. For example, at least one of the reporters can be immobilized by attaching to a tether. In some embodiments, a plurality of reporters (e.g., at least 2, 3, 4, 5, 10, 15, or more) are attached to the linkage. In some embodiments, reporters are attached to both the linkage and an end of the guide nucleic acid. In some cases, a reporter comprises a detection moiety. In some cases, a reporter comprises an enzyme, such as HRP, as shown in FIG. 217. Molecules comprising a guide nucleic acid joined to a reporter are also referred to herein as “gREPs”.

Methods of Making Polymer Matrices with Immobilized Reporters

[0676] FIG. 149 shows an exemplary polymer immobilization matrix (14901) comprising a plurality of immobilized DETECTR reaction components. The DETECTR reaction components may comprise one or more reporters, one or more programmable nucleases, and/or one or more guide nucleic acids. In some embodiments, the polymer matrix may comprise a hydrogel. In the exemplary embodiment shown in FIG. 149, a plurality of reporters (14902) may be immobilized within a hydrogel (14901) matrix. In some embodiments, methods of immobilizing a reporter (14902) and/or other DETECTR reaction component may comprise (a) providing a polymerizable composition comprising: (i) a plurality of oligomers, (ii) a plurality of polymerizable (e.g., functionalized) oligomers, (iii) a set of polymerizable (e.g., functionalized) reporters (and/or other DETECTR reaction components), and (iv) a set of polymerization initiators; and (b) initiating the polymerization reaction by providing an initiation stimulus.

[0677] Co-polymerization of the reporter into the hydrogel may result in a higher density of reporter/unit volume or reporter/unit area than other immobilization methods utilizing surface immobilization (e.g., onto beads). Co-polymerization of the reporter into the hydrogel may result in less undesired release of the reporter (e.g., during an assay, a measurement, or on the shelf), and thus may cause less background signal, than other immobilization strategies (e.g., conjugation to a pre-formed hydrogel, bead, etc.). In at least some instances this may be due to better incorporation of reporters into the hydrogel as a co-polymer and fewer “free” reporter molecules retained on the hydrogel via non-covalent interactions or non-specific binding interactions.

[0678] In some embodiments, the plurality of oligomers and the plurality of polymerizable oligomers may comprise an irregular or non-uniform mixture. The irregularity of the mixture of polymerizable oligomers and unfunctionalized oligomers may allow pores to form within the hydrogel (i.e., the unfunctionalized oligomers may act as a porogen). For example, the irregular mixture of oligomers may result in phase separation during polymerization that allows for the generation of pores of sufficient size for programmable nucleases to diffuse into the hydrogel and access internal reporter molecules. The relative percentages and/or molecular weights of the oligomers may be varied to vary the pore size of the hydrogel. For example, pore size may be tailored to increase the diffusion coefficient of the programmable nucleases.

[0679] In some embodiments, the functional groups attached to the reporters may be selected to preferentially incorporate the reporters into the hydrogel matrix via covalent binding at the functional group versus other locations along the nucleic acid of the reporter. In some embodiments, the functional groups attached to the reporters may be selected to favorably transfer free radicals from the functionalized ends of polymerizable oligomers to the functional group on the end of the reporter (e.g., 5′ end), thereby forming a covalent bond and immobilizing the reporter rather than destroying other parts of the reporter molecules.

[0680] In some embodiments, the polymerizable composition may further comprise one or more polymerizable nucleic acids. In some embodiments, the polymerizable nucleic acids may comprise guide nucleic acids (e.g., guide nucleic acids 15003a, 15003b, or 15003c shown in FIGS. 150A-150B). In some embodiments, the polymerizable nucleic acids may comprise linker or tether nucleic acids. In some embodiments, the polymerizable nucleic acids may be configured to bind to a programmable nuclease (e.g., programmable nuclease 15004a, 15004b, or 15004c shown in FIGS. 150A-150B). In some embodiments, the programmable nuclease may be immobilized in the polymer matrix.

[0681] In some embodiments, the oligomers may form a polymer matrix comprising a hydrogel. In some embodiments, the oligomers may comprise poly (ethylene glycol) (PEG), poly (siloxane), poly (hydroxyethyl acrylate, poly (acrylic acid), poly (vinyl alcohol), poly (butyl acrylate), poly (2-ethylhexyl acrylate), poly (methyl acrylate), poly (ethyl acrylate), poly (acrylonitrile), poly (methyl methacrylate), poly (acrylamide), poly (TMPTA methacrylate), chitosan, alginate, or the like, or any combination thereof. One of ordinary skill in the art will recognize that the oligomers may comprise any oligomer or mix of oligomers capable of forming a hydrogel.

[0682] In some embodiments, the oligomers may comprise polar monomers, nonpolar monomers, protic monomers, aprotic monomers, solvophobic monomers, or solvophillic monomers, or any combination thereof.

[0683] In some embodiments, the oligomers may comprise a linear topology, branched topology, star topology, dendritic topology, hyperbranched topology, bottlebrush topology, ring topology, catenated topology, or any combination thereof. In some embodiments, the oligomers may comprise 3-armed topology, 4-armed topology, 5-armed topology, 6-armed topology, 7-armed topology, 8-armed topology, 9-armed topology, or 10-armed topology.

[0684] In some embodiments, the oligomers may comprise at least about 2 monomers, at least about 3 monomers, at least about 4 monomers, at least about 5 monomers, at least about 6 monomers, at least about 7 monomers, at least about 8 monomers, at least about 9 monomers, at least about 10 monomers, at least about 20 monomers, at least about 30 monomers, at least about 40 monomers, at least about 50 monomers, at least about 60 monomers, at least about 70 monomers, at least about 80 monomers, at least about 90 monomers, at least about 100 monomers, at least about 200 monomers, at least about 300 monomers, at least about 400 monomers, at least about 500 monomers, at least about 600 monomers, at least about 700 monomers, at least about 800 monomers, at least about 900 monomers, at least about 1000 monomers, at least about 2000 monomers, at least about 3000 monomers, at least about 4000 monomers, at least about 5000 monomers, at least about 6000 monomers, at least about 7000 monomers, at least about 8000 monomers, at least about 9000 monomers, at least about 10000 monomers, at least about 20000 monomers, at least about 30000 monomers, at least about 40000 monomers, at least about 50000 monomers, at least about 60000 monomers, at least about 70000 monomers, at least about 80000 monomers, at least about 90000 monomers, or at least about 100000 monomers.

[0685] In some embodiments, the oligomers may comprise a homopolymer, a copolymer, a random copolymer, a block copolymer, an alternative copolymer, a copolymer with regular repeating units, or any combination thereof.

[0686] In some embodiments, the oligomers may comprise 1 type of monomer, 2 types of monomers, 3 types of monomers, 4 types of monomers, 5 types of monomers, 6 types of monomers, 7 types of monomers, 8 types of monomers, 9 types of monomers, or 10 types of monomers.

[0687] The polymerizable oligomers may comprise any of the oligomers described herein. In some embodiments, the polymerizable oligomers may comprise one or more functional groups. In some embodiments, the functional group may comprise an acrylate group, N-hydroxysuccinimide ester group, thiol group, carboxyl group, azide group, alkyne group, an alkene group, or any combination thereof. One of ordinary skill in the art will recognize that a variety of functional groups may be used to functionalize oligomers into polymerizable oligomers depending on the desired properties of the polymerizable oligomers.

[0688] In some embodiments, the polymerizable oligomers may form a polymer matrix comprising a hydrogel. In some embodiments, the polymerizable oligomers may comprise PEG, poly (siloxane), poly (hydroxyethyl acrylate, poly (acrylic acid), poly (vinyl alcohol), or any combination thereof. One of ordinary skill in the art will recognize that the set of polymerizable oligomers may comprise any polymer capable of forming a hydrogel.

[0689] In some embodiments, the set of polymerizable oligomers comprises polar monomers, nonpolar monomers, protic monomers, aprotic monomers, solvophobic monomers, or solvophillic monomers.

[0690] In some embodiments, the set of polymerizable oligomers comprises a linear topology, branched topology, star topology, dendritic topology, hyperbranched topology, bottlebrush topology, ring topology, catenated topology, or any combination thereof. In some embodiments, the set of polymerizable oligomers comprises 3-armed topology, 4-armed topology, 5-armed topology, 6-armed topology, 7-armed topology, 8-armed topology, 9-armed topology, or 10-armed topology.

[0691] In some embodiments, the set of polymerizable oligomers comprises at least about 2 monomers, at least about 3 monomers, at least about 4 monomers, at least about 5 monomers, at least about 6 monomers, at least about 7 monomers, at least about 8 monomers, at least about 9 monomers, at least about 10 monomers, at least about 20 monomers, at least about 30 monomers, at least about 40 monomers, at least about 50 monomers, at least about 60 monomers, at least about 70 monomers, at least about 80 monomers, at least about 90 monomers, at least about 100 monomers, at least about 200 monomers, at least about 300 monomers, at least about 400 monomers, at least about 500 monomers, at least about 600 monomers, at least about 700 monomers, at least about 800 monomers, at least about 900 monomers, at least about 1000 monomers, at least about 2000 monomers, at least about 3000 monomers, at least about 4000 monomers, at least about 5000 monomers, at least about 6000 monomers, at least about 7000 monomers, at least about 8000 monomers, at least about 9000 monomers, at least about 10000 monomers, at least about 20000 monomers, at least about 30000 monomers, at least about 40000 monomers, at least about 50000 monomers, at least about 60000 monomers, at least about 70000 monomers, at least about 80000 monomers, at least about 90000 monomers, or at least about 100000 monomers. As used herein, “about” may mean plus or minus 1 monomer, plus or minus 10 monomers, plus or minus 100 monomers, plus or minus 1000 monomers, plus or minus 10000 monomers, or plus or minus 100000 monomers.

[0692] In some embodiments, the set of polymerizable oligomers comprises a homopolymer, a copolymer, a random copolymer, a block copolymer, an alternative copolymer, a copolymer with regular repeating units, or any combination thereof.

[0693] In some embodiments, the set of polymerizable oligomers comprises 1 type of monomer, 2 types of monomers, 3 types of monomers, 4 types of monomers, 5 types of monomers, 6 types of monomers, 7 types of monomers, 8 types of monomers, 9 types of monomers, or 10 types of monomers.

[0694] In some embodiments, the polymerizable composition may comprise a mix of unfunctionalized or unmodified oligomers and polymerizable oligomers as described herein. In some embodiments, the unfunctionalized or unmodified oligomers may act as porogens to generate pores within the polymer matrix.

[0695] The polymerizable reporters may comprise any of the reporters described herein. In some embodiments, the set of polymerizable reporters may comprise one or more functional groups. In some embodiments, the functional group may comprise a single stranded nucleic acid, a double stranded nucleic acid, an acrydite group, a 5′ thiol modifier, a 3′ thiol modifier, an amine group, a I-Linker™ group, methacryl group, or any combination thereof. One of ordinary skill in the art will recognize that a variety of functional groups may be used with the set of polymerizable reporters depending on the desired properties of the polymerizable reporters.

[0696] In some embodiments, the set of initiators may comprise one or more photoinitiators or thermal initiators. In some embodiments, the set of initiators may comprise cationic initiators, anionic initiators, or radical initiators. In some embodiments, the set of initiators may comprise AIBN, AMBN, ADVN, ACVA, dimethyl 2,2′-azo-bis (2methylpropionate), AAPH, 2,2′-azobis [2-(2-imidazolin-2-yl)-propane] dihydrochloride, TBHP, cumene hydroperoxide, di-tert-butyl peroxide, dicumyl peroxide, BPO, dicyandamide, cyclohexyl tosylate, diphenyl (methyl) sulfonium tetrafluoroborate, benzyl (4-hydroxyphenyl)-methylsulfonium hexafluoroantimonate, (4-hydroxyphenyl) methyl-(2-methylbenzyl) sulfonium hexafluoroantimonate, camphorquinone, acetophenone, 3-acetophenol, 4-acetophenol, benzophenone, 2-methylbenzophenone, 3-methylbenzophenone, 3-hydroxybenzophenone, 3,4-dimethylbenzophenone, 4-hydroxybenzophenone, 4-benzoylbenzoic acid, 2-benzoylbenzoic acid, methyl 2-benzoylbenzoate, 4,4′-dihydroxybenzophenone, 4-(dimethylamino)-benzophenone, 4,4′-bis (dimethylamino)-benzophenone, 4,4′-bis (diethylamino)-benzophenone, 4,4′-dichlorobenzophenone, 4-(p-tolylthio) benzophenone, 4-phenylbenzophenone, 1,4-dibenzoylbenzene, benzil, 4,4′-dimethylbenzil, p-anisil, 2-benzoyl-2-propanol, 2-hydroxy-4′-(2-hydroxyethoxy)-2-methylpropiophenone, 1-benzoylchclohexanol, benzoin, anisoin, benzoin methyl ether, benzoin ethyl ether, benzoin isopropyl ether, benzoin isobutyl ether, o-tosylbenzoin, 2,2-diethoxyacetophenone, benzil dimethylketal, 2-methyl-4′-(methylthio)-2-morpholinopropiophenone, 2-benzyl-2-(dimethylamino)-4′-morpholinobutyrophenone, 2-isonitrosopropiophenone, anthraquinone, 2-ethylantraquinone, sodium anthraquinone-2-sulfonate monohydrate, 9,10-phenanthrenequinone, 9,10-phenanthrenequinone, dibenzosuberenone, 2-chlorothioxanthone, 2-isopropylthioxanthone, 2,4-diethylthioxanthen-9-one, 2,2′bis (2-chlorophenyl)-4,4′,5,5′-tetraphenyl-1,2′-biimidazole, diphenyl (2,4,6-trimethyl-benzoyl) phosphine oxide, phenylbis (2,4,6-trimethyl-benzoyl) phosphine oxide, lithium phenyl (2,4,6-trimethylbenzoyl) phosphinate, diphenyliodonium trifluoromethanesulfonate, diphenyliodonium hexafluorophosphate, diphenyliodonium hexafluoroarsenate, bis (4-tert-butylphenyl)-iodonium triflate, bis (4-tert-butylphenyl) iodonium hexafluorophosphate, 4-isopropyl-4′-methyl-diphenyliodonium tetrakis (pentafluorophenyl) borate, [4-[(2-hydroxytetradecyl)-oxy]phenyl]phenyliodonium hexafluoroantimonate, bis [4-(tert-butyl) phenyl]-iodonium tetra (nonafluoro-tert-butoxy) aluminate, cyclopropyldiphenylsulfonium tetrafluoroborate, triphenylsulfonium bromide, triphenylsulfonium tetrafluoroborate, tri-p-tolylsulfonium triflate, tri-p-tolylsulfonium hexafluorophosphate, 4-nitrobenzenediazonium tetrafluoroborate, 2-(4-methoxyphenyl)-4,6-bis (trichloromethyl)-1,3,5-triazine, 2-(1,3-benzodioxol-5-yl)-4,6-bis (trichloromethyl)-1,3,5-triazine, 2-(4-methoxystyryl)-4,6-bis (trichloromethyl)-1,3,5-triazine, 2-(3,4-dimethoxystyryl)-4,6-bis (trichloromethyl)-1,3,5-triazine, 2-[2-(Furan-2-yl) vinyl]-4,6-bis (trichloromethyl)-1,3,5-triazine, 2-[2-(5-methylfuran-2-yl) vinyl]-4,6-bis (trichloromethyl)-1,3,5-triazine, 2-(9-oxoxanthen-2-yl) proprionic acid 1,5,7-triazabicyclo[4.4.0]dec-5-ene salt, 2-(9-oxoxanthen-2-yl) proprionic acid 1,5-diazabicyclo[4.3.0]non-5-ene salt, 2-(9-oxoxanthen-2-yl) proprionic acid 1,8-diazabicyclo [5.4.0]-undec-7-ene salt, acetophenone O-benzoyloxime, 2-nitrobenzyl cyclohexylcarbamate, 1,2-bis (4-methoxyphenyl)-2-oxoethyl cyclohexylcarbamate, tert-amyl peroxybenzoate, 4,4-azobis (4-cyanovaleric acid), 1,1′-azobis (cyclohexanecarbonitrile), 2,2′-azobisisobutyronitrile, benzoyl peroxide, 2,2-bi (tert-butylperoxy) butane, 1,1-bis (tert-butylperoxy) cyclohexane, 2,5-bis (tert-butylperoxy)-2,5-dimethylhexane, bis (1-(tert-butylperoxy)-1-methylethyl) benzene, 1,1-bis (tert-butylperoxy)-3,3,5-trimethylcyclohexane, tert-butyl hydroperoxide, tert-butyl peracetate, tert-butyl peroxide, tert-butyl peroxybenzoate, tert-butylperoxy isopropyl carbonate, cumene hydroperoxide, cyclohexanone peroxide, dicumyl peroxide, lauroyl peroxide, 2,4-pentanedione peroxide, peracetic acid, potassium persulfate, 2-Hydroxy-2-methylpropiophenone, or any combination thereof. One of ordinary skill in the art will recognize that a variety of initiators may be used depending on the desired reaction conditions and chemistries.

[0697] In some embodiments, the initiation stimulus is UV light. In some embodiments, the initiation stimulus is UV light through a photomask. In some embodiments, the initiation stimulus is heat.

[0698] In some embodiments, the hydrogel may comprise a circular cross-sectional shape, a rectangular cross-sectional shape, a star cross-sectional shape, a dollop shape, an amorphous shape, or any shape of interest, or any combination thereof (e.g., as shown in FIGS. 150A-150B).

[0699] In some embodiments, a mask may be used to shape the initiation stimulus deposition on the polymerizable components (e.g., oligomers, etc.) and thereby shape the resulting polymer matrix. In some embodiments, the mask may comprise a circular shape, a rectangular shape, a star shape, a dollop shape, an amorphous shape, or any shape of interest, or any combination thereof.

Hydrogel Compositions with Immobilized Reporters

[0700] FIG. 149 and FIGS. 150A-150B show examples of hydrogels comprising immobilized reporters. In some aspects, provided herein are compositions comprising a hydrogel (14901) comprising (a) a network of covalently bound oligomers (14903) and (b) immobilized reporters (14902) covalently bound to said network (14903).

[0701] FIG. 149 shows an exemplary hydrogel (14901) comprising a plurality of reporters (14902) co-polymerized with a plurality of oligomers (modified and unmodified) to form a network or matrix (14903). FIGS. 150A-150B show exemplary multiplexing schemes utilizing hydrogel-immobilized reporters which may be implemented in any of the devices or methods described herein. Multiplexing could be distinguished through spatial multiplexing by knowing the location of hydrogels functionalized with each guide nucleic acid and/or through shape, by using different shapes of hydrogel for each guide nucleic acid.

[0702] In some embodiments, the composition may comprise a hydrogel (15001) comprising (a) a polymer network comprising covalently bound oligomers co-polymerized with reporters (15002) to covalently bind and immobilize the reporters to said network, and (b) immobilized programmable nuclease complexes covalently bound to said network (e.g., via co-polymerization or after reporter-immobilized polymer formation), wherein said programmable nuclease complexes may comprise a programmable nuclease (15004) and a guide nucleic acid (15003). In some embodiments, the guide nucleic acid (15003) and/or the programmable nuclease (15004) may be immobilized to or in the hydrogel as described herein (e.g., during or after formation of the hydrogel).

[0703] In some embodiments, the network of covalently bound oligomers may comprise a network formed by polymerizing one or more PEG species. In some embodiments, the network of covalently bound oligomers may comprise a network formed by polymerizing PEG comprising acrylate functional groups. In some embodiments, the acrylate functional groups may be PEG end groups. In some embodiments, the network may be formed by polymerizing PEG comprising acrylate functional groups with unmodified PEG. The molecular weight of the acrylate-modified PEG (e.g., PEG-diacrylate) and the unmodified PEG may be the same or different.

[0704] In some embodiments, the network of covalently bound oligomers may comprise a network formed from polymerizing one or more PEG species, wherein each PEG species may comprise a linear topology, branched topology, star topology, dendritic topology, hyperbranched topology, bottlebrush topology, ring topology, catenated topology, or any combination thereof. In some embodiments, the network of covalently bound oligomers may comprise a network formed from polymerizing one or more PEG species comprising a 3-armed topology, a 4-armed topology, a 5-armed topology, a 6-armed topology, a 7-armed topology, a 8-armed topology, a 9-armed topology, or a 10-armed topology.

[0705] In some embodiments, the immobilized reporter may comprise a reporter molecule covalently bound to a linker molecule, wherein the linker molecule is covalently bound to the hydrogel (e.g., via co-polymerization with the oligomers as described herein). In some embodiments, the linker molecule may comprise a single stranded nucleic acid, a double stranded nucleic acid, an acrydite group, a 5′ thiol modifier, a 3′ thiol modifier, an amine group, a I-Linker™ group, or any combination thereof. One of ordinary skill in the art will recognize that a variety of linker molecules may be used.

[0706] In some cases, the immobilized guide nucleic acid may comprise a guide nucleic acid covalently bound to a linker molecule, wherein the linker molecule is covalently bound to the hydrogel. In some embodiments, the linker molecule may comprise a single stranded nucleic acid, a double stranded nucleic acid, an acrydite group, a 5′ thiol modifier, a 3′ thiol modifier, an amine group, a I-Linker™ group, or any combination thereof. One of ordinary skill in the art will recognize that a variety of linker molecules may be used.

[0707] In some cases, the immobilized programmable nuclease may comprise a programmable nuclease covalently bound to a linker molecule, wherein the linker molecule is covalently bound to the hydrogel. In some embodiments, the linker molecule may comprise a single stranded nucleic acid, a double stranded nucleic acid, an acrydite group, a 5′ thiol modifier, a 3′ thiol modifier, an amine group, a I-Linker™ group, or any combination thereof. One of ordinary skill in the art will recognize that a variety of linker molecules may be used.

Methods of Using Hydrogels with Immobilized Reporters

[0708] Any of the methods described herein may utilize hydrogels (14901) with immobilized reporters (14902) for target detection assays. In some embodiments, the hydrogel (14901) comprises (a) a network of covalently bound oligomers (14903) and (b) immobilized reporters (14902) covalently bound to said network (14903) as shown in FIG. 149. A solution comprising target nucleic acid molecules and programmable nuclease complexes may be applied to the hydrogel (e.g., by pipetting or flowing over the hydrogel). The immobilized reporters (14902) may comprise a nucleic acid with a sequence cleavable by the programmable complex when the programmable nuclease complex is activated by binding of its associated guide nucleic acid to a target nucleic acid molecule as described herein. When activated, the programmable nuclease complex may trans-cleave the cleavable nucleic acid of the reporter molecule and generates a detectable signal as described herein. For example, the reporter may comprise a detection moiety which may be release upon cleavage of the reporter as described herein. The detection moiety may comprise FAM-biotin which may be captured by one or more capture molecules coupled to a surface of a support (e.g., a lateral flow assay strip) at a detection location as described herein. Detection of the detectable signal generated at the detection location by the detection moiety may indicate the presence of the target nucleic acid in the sample as described herein.

[0709] Any of the multiplexing methods described herein may utilize hydrogels (15001a, 15001b, 15001c, etc.) with immobilized reporters (15002) for multiplexed target detection assays. In some embodiments, each hydrogel (15001a, 150001b, 15001c, etc.) may comprise (a) a polymer network of covalently bound oligomers co-polymerized with reporters (15002) to covalently bind and immobilize the reporters to said network, and (b) one or more immobilized programmable nuclease complexes covalently bound to said network as shown in FIGS. 150A-150B. Each of the programmable nuclease complexes may comprise a programmable nuclease (15004a, 15004b, 15004c, etc.) and a guide nucleic acid (15003a, 15003b, 15003c, etc.). In some embodiments, the guide nucleic acid (15003) and/or the programmable nuclease (15004) may be immobilized to or in the hydrogel as described herein (e.g., during or after formation of the hydrogel). In some embodiments, multiplexing for a plurality of different targets may be facilitated by providing a plurality different and/or spatially separated hydrogels comprising a plurality of different DETECTR reaction components. In some embodiments, each hydrogel may comprise a different programmable nuclease as described herein. Alternatively, or in combination, each hydrogel may comprise a different guide nucleic acid configured to bind to a different target nucleic acid sequence as described herein. Alternatively, or in combination, each hydrogel may comprise a different reporter as described herein. Alternatively, or in combination, each hydrogel may comprise a different shape and be deposited on a surface of a support at different detection locations. For example, as shown in FIGS. 150A-150B, a first hydrogel (15001a) may comprise a first programmable nuclease (15004a), a first guide nucleic acid (15003a) configured to bind a first target nucleic acid, and a first reporter (15002). A second hydrogel (15001b) may comprise a second programmable nuclease (15004b), a second guide nucleic acid (15003b) configured to bind a second target nucleic acid, and a second reporter (15002). A third hydrogel (15001c) may comprise a third programmable nuclease (15004c), a third guide nucleic acid (15003c) configured to bind a third target nucleic acid, and a third reporter (15002). The programmable nucleases (15004a, 15004b, 15004c) may be the same programmable nuclease or different programmable nuclease. The guide nucleic acids (15003a, 15003b, 15003c) may be different guide nucleic acids configured to recognize different target nucleic acids. The reporters (15002) may be the same reporter or different reporters. A solution comprising one or more target nucleic acid molecules may be applied to the hydrogels (15001a, 15002b, 15003c), e.g., by pipetting or flowing over the hydrogels. The immobilized reporters (15002) may comprise a nucleic acid with a sequence cleavable by the programmable nuclease complexes (15004a, 15004b, 15004c) when the programmable nuclease complexes are activated by binding of their respective guide nucleic acids (15003a, 15003b, 15003c) to their respective target nucleic acid molecules as described herein. When activated, the programmable nuclease complexes may trans-cleave the cleavable nucleic acid of the reporter molecule and generates a detectable signal at the detection location as described herein. For example, the reporter may comprise a detection moiety which may be release upon cleavage of the reporter as described herein. The detection moiety may comprise FAM-biotin as shown in FIG. 150A which may be captured by one or more capture molecules coupled to a surface of a support (e.g., a lateral flow assay strip) at a detection location as described herein. Alternatively, the detection moiety may comprise a quencher moiety which may be released from the hydrogel upon cleavage of the reporter, thereby allowing a fluorescent moiety on the other end of the reporter to fluoresce at the detection location comprising the hydrogel as shown in FIG. 150B. Detection of the detectable signal generated at the detection locations by the detection moiety may indicate the presence of the target nucleic acid in the sample as described herein. Each hydrogel (15001a, 15001b, 15001c) may have a different shape and detection of a target nucleic acid may comprise detecting a particular fluorescent shape corresponding to the hydrogel shape at the detection location.

Devices Comprising Hydrogels with Immobilized Reporters

[0710] Any of the systems or devices described herein may comprise one or more hydrogels with immobilized reporters.

[0711] In some embodiments, the systems and devices described herein may comprise a plurality of hydrogels each comprising reporter molecules (e.g., in order to facilitate multiplexing and/or improve signal). In some embodiments, a first hydrogel may comprise a shape different from a shape of a second hydrogel. In some embodiments, the first hydrogel may comprise a plurality of first reporter molecules different from a plurality of second reporter molecules of the second hydrogel. In some embodiments, the reporters are the same in the first and second hydrogels. In some embodiments, the first hydrogel may comprise a circular shape, a square shape, a star shape, or any other shape distinguishable from a shape of the second hydrogel. In some embodiments, the plurality of first reporter molecules may each comprise a sequence cleavable by a programmable nuclease complex comprising a first programmable nuclease and a first guide nucleic acid. In some embodiments, the plurality of second reporter molecules may each comprise a sequence not cleavable by the first programmable nuclease complex.

[0712] Any of the systems or devices described herein may comprise a plurality of hydrogels each comprising reporter molecules. For example, a first hydrogel may comprise a plurality of first reporter molecules different from a plurality of second reporter molecules of a second hydrogel. In some embodiments, the plurality of first reporter molecules may each comprise a first fluorescent moiety, wherein the first fluorescent moiety is different than second fluorescent moieties of in each of the plurality of second reporter molecules. In some embodiments, the plurality of first reporter molecules may each comprise a sequence cleavable by a first programmable nuclease complex comprising a first programmable nuclease and a first guide nucleic acid. In some embodiments, the plurality of second reporter molecules may each comprise a sequence cleavable by a second programmable nuclease complex comprising a second programmable nuclease and a second guide nucleic acid.

[0713] Any of the systems or devices described herein may comprise at least about 2 hydrogels, at least about 3 hydrogels, at least about 4 hydrogels, at least about 5 hydrogels, at least about 6 hydrogels, at least about 7 hydrogels, at least about 8 hydrogels, at least about 9 hydrogels, at least about 10 hydrogels, at least about 20 hydrogels, at least about 30 hydrogels, at least about 40 hydrogels, at least about 50 hydrogels, at least about 60 hydrogels, at least about 70 hydrogels, at least about 80 hydrogels, at least about 90 hydrogels, at least about 100 hydrogels, at least about 200 hydrogels, at least about 300 hydrogels, at least about 400 hydrogels, at least about 500 hydrogels, at least about 600 hydrogels, at least about 700 hydrogels, at least about 800 hydrogels, at least about 900 hydrogels, at least about 1000 hydrogels,

[0714] Any of the systems or devices described herein may comprise one or more compartments, chambers, channels, or locations comprising the one or more hydrogels. In some embodiments, two or more of the compartments may be in fluid communication, optical communication, thermal communication, or any combination thereof with one another. In some embodiments, two or more compartments may be arranged in a sequence. In some embodiments, two or more compartments may be arranged in parallel. In some embodiments, two or more compartments may be arranged in sequence, parallel, or both. In some embodiments, one or more compartments may comprise a well. In some embodiments, one or more compartments may comprise a flow strip. In some embodiments, one or more compartments may comprise a heating element.

[0715] In some embodiments, the device may be a handheld device. In some embodiments, the device may be point-of-need device. In some embodiments, the device may comprise any one of the device configurations described herein. In some embodiments, the device may comprise one or more parts of any one of the device configurations described herein.

### Amplifying Signals Using Positive Feedback Systems

[0716] Any of the methods described herein may comprise amplifying a detection signal using a positive feedback system. FIGS. 151A-151B illustrates an exemplary positive feedback system for signal amplification. In some embodiments, a method for signal amplification may comprise binding a first nuclease, e.g., a first programmable nuclease (15101a) bound to a first guide nucleic acid (15102) with a first target nucleic acid (15103) to generate a first activated programmable nuclease complex (15101b), as shown in FIG. 151A. The first target nucleic acid (15103) may be present in a sample. Activation of the first programmable nuclease may result in release of one or more secondary target-specific guide nucleic acids (15104) from a first location (15105). The secondary target-specific guide nucleic acids (15104) may each comprise a nucleic acid tether (15106) capable of being cleaved by the first activated programmable nuclease complex. The secondary target-specific guide nucleic acids may be released by trans-cleaving the nucleic acid tethers (15106) via the first activated programmable nuclease complex. The secondary target-specific guide nucleic acids (15104) may then bind to an uncomplexed second programmable nuclease (15101a) present at the first location (15105), as shown in FIG. 151B. The second programmable nuclease (15101a) may then bind a second target nucleic acid (15108) at a second location (15109) to generate a second activated programmable nuclease complex (15101b). The second activated programmable nuclease complex (15101b) may then cleave the second target nucleic acid (15108) or remain immobilized at the second location (15109). One or more reporters may be present (e.g., free-floating, immobilized to a surface of a support at a third location, etc.) which may be cleaved by the first and second activated programmable nuclease complexes as described herein. Alternatively, or in combination, one or more of the secondary target-specific guide nucleic acid (15104), the tether (15106), and/or the second target nucleic acid (15108) may comprise a detection moiety which may provide a detectable signal upon cleavage of the nucleic acid species to which it is bound. In some embodiments, the detection moiety comprises a quencher-fluorophore pair as described herein.

[0717] A single first target nucleic acid can lead to the release of a plurality of secondary target-specific guide nucleic acids and the generation of the plurality of second activated programmable nuclease complexes as described herein. Then each second activated programmable nuclease complex can lead to the generation of another plurality of secondary target-specific guide nucleic acids and another plurality of second activated programmable nuclease complexes. And so on. The second activated programmable nuclease complexes can generate additional signal beyond that of the first activated programmable nuclease complex alone as described herein. Therefore, the detection of the single first target nucleic acid can activate a positive feedback loop for amplifying its signal.

[0718] In some aspects, provided herein are compositions for amplifying a detection signal using a positive feedback system. In some embodiments, a composition may comprise: (a) a first set of programmable nucleases (15101) each comprising a first guide nucleic acid (15102), wherein each programmable nuclease in the first set of programmable nucleases is configured to bind with a first target nucleic acid (15103) and then trans-cleave a plurality of nucleic acids comprising a first sequence; (b) a plurality of secondary target-specific guide nucleic acids (15104) each comprising a nucleic acid tether (15106) comprising the first sequence; (c) a second set of programmable nucleases (15101) each configured to bind with a secondary target-specific guide nucleic acid which is configured to bind with a second target nucleic acid and then cleave a plurality of nucleic acids comprising a second sequence; a plurality of second target nucleic acids (15108) each comprising the second sequence.

[0719] In some embodiments, the first programmable nuclease (15101) may be free in solution, as illustrated in FIGS. 151A-151B. In some embodiments, the first programmable nuclease (15401) may be immobilized to a substrate (e.g., 15105, 15109, etc.). In some embodiments, the second programmable nuclease (15101) may be free in solution. In some embodiments, the second programmable nuclease (15101) may be immobilized to a substrate (e.g., 15105, 15109, etc.).

[0720] In some embodiments, one or more components of the composition may be immobilized on a substrate (e.g., 15105, 15109).

[0721] In some embodiments, the substrate (15105, 15109) may comprise a hydrogel, as illustrated in FIG. 151. In some embodiments, a first hydrogel (15105) may comprises a secondary target-specific guide nucleic acid (15104) immobilized by a single-stranded nucleic acid (15106). In some embodiments, a second hydrogel (15109) may comprise an immobilized second target nucleic acid (15108). In some embodiments, the substrate (15105, 15109) may comprise a reporter-incorporated hydrogel as described herein. In some embodiments, the substrate (15105, 15109) may be in the form of a bead. In some embodiments, the substrate (15105, 15109) may be a glassy material. In some embodiments, the substrate (15105, 15109) may be a polymeric material.

[0722] In some embodiments, the secondary target-specific guide nucleic acids (15104) may be immobilized to a substrate (15105, 15109). In some embodiments, the secondary target-specific guide nucleic acids (15104) may be immobilized with a single stranded nucleic acid tether (15106). In some embodiments, the secondary target-specific guide nucleic acids (15104) may be free in solution. In some embodiments, the secondary target-specific guide nucleic acids (15104) may comprise reporters. In some embodiments, the secondary target-specific guide nucleic acids (15104) may comprise detection moieties (15111).

[0723] In some embodiments, the second target nucleic acids (15108) may be immobilized on a substrate (15105, 15109). In some embodiments, the second target nucleic acids (15108) may be free in solution. In some embodiments, the second target nucleic acids (15108) may comprise reporters. In some embodiments, the second target nucleic acids (15108) may comprise detection moieties (15111).

[0724] In some embodiments, the compositions for amplifying a detection signal using a positive feedback system can be described step-wise as shown in FIG. 214 which shows a schematic representation of a surface-immobilized positive-feedback system wherein the Cas #1 is initially in the solution and Cas #2 is initially immobilized. In a subsequent step, Cas #1 forms an activated complex upon binding to a first target nucleic acid and cleaves the ssDNA tether linking Cas #2 to the surface. The released Cas #2 is activated upon complexing with a second target nucleic acid (immobilized target #2), and the activated Cas #2 is effective to release additional immobilized Cas #2 and to cleave the reporter to produce a detectable product. In some embodiments, Cas #1 and Cas #2 are the same. In some embodiments, Cas #1 and Cas #2 are different. In some embodiments, target #1 is different for each of a plurality of reactions (e.g., in a plurality of wells), and target #2 is (a) different from each target #1, and (b) the same as each target #2 in the plurality of reactions.

[0725] The programmable nucleases may comprise any of the programmable nucleases described herein. In some embodiments, the nuclease is an endonuclease. In some embodiments, the nuclease is a Cas9 enzyme. In some embodiments, the nuclease is a mutant Cas9 enzyme. In some embodiments, the nuclease is an engineered Cas9 enzyme. In some embodiments, the nuclease is a Cas12 enzyme. In some embodiments, the nuclease is a Cas13 enzyme. In some embodiments, the nuclease is a Cas14 enzyme. In some embodiments, the nuclease is a CasPhi enzyme.

[0726] In some embodiments, the first and second programmable nucleases are the same. In some embodiments, the first and second programmable nucleases are different. In some embodiments, the programmable nucleases carry out cis cleavage. In some embodiments, the programmable nucleases carry out trans cleavage.

[0727] In some embodiments, cleaving by a programmable nuclease activates a reporter. In some embodiments, cleaving by a programmable nuclease activates (e.g., releases, unquenches, etc.) a detection moiety. In some embodiments, cleaving a nucleic acid tether activates a reporter. In some embodiments, cleaving a second target nucleic acid activates a reporter.

### Devices for Amplifying Signals Using Positive Feedback Systems

[0728] Any of the devices described herein may be configured for amplifying a detection signal using a positive feedback system. In some embodiments, a device may comprise one or more compartments configured to: (a) bind a first nuclease (15101) with a first guide nucleic acid (15102) and a first target nucleic acid (15103) to generate a first complex; (b) release one or more second guide nucleic acids (15104) each comprising a nucleic acid tether (15106) by cleaving the nucleic acid tether(s) (15106) with the first complex; (c) bind the second guide nucleic acids (15104) each with a second nuclease (15101) and a second target nucleic acid (15108) to generate a plurality of second complexes; (d) cleave a plurality of reporters with the first and second complexes as described herein. Additional second complexes may be formed by further cleavage by the first and second complexes as described herein.

[0729] In some embodiments, a device may comprise one or more compartments comprising: (a) a first set of nucleases (15101) each comprising a first guide nucleic acid (15402), wherein each nuclease in the first set of nucleases is configured to bind with a first target nucleic acid (15103) and then cleave a plurality of nucleic acids comprising a first sequence; (b) a plurality of secondary target-specific guide nucleic acids (15104)) each comprising a nucleic acid tether (15106) comprising the first sequence; (c) a second set of nucleases (15101) each configured to bind with the secondary target-specific guide nucleic acid (15104) and a second target nucleic acid (15108) and then cleave a plurality of nucleic acids; (d) a plurality of second target nucleic acids (15108).

[0730] In some embodiments, one or more compartments may be in fluid communication, optical communication, thermal communication, or any combination thereof with one another. In some embodiments, one or more compartments may be arranged in a sequence. In some embodiments, one or more compartments may be arranged in parallel. In some embodiments, one or more compartments may be arranged in sequence, parallel, or both. In some embodiments, one or more compartments may comprise a well. In some embodiments, one or more compartments may comprise a flow strip. In some embodiments, one or more compartments may comprise a heating element.

[0731] In some embodiments, the device may be a handheld device. In some embodiments, the device may be point-of-need device. In some embodiments, the device may comprise any one of the device configurations described in this disclosure. In some embodiments, the device may comprise one or more parts of any one of the device configurations described herein.

Assay Compositions with Thermostable Inorganic Pyrophosphatase

[0732] Any of the systems, methods, or devices described herein may comprise using thermostable inorganic pyrophosphatase (TIPP). In some embodiments, a composition for an assay may comprise TIPP. In some embodiments, the composition may comprise about 0.5 enzyme unit (U) per 10 μL of solution. In some embodiments, the composition may comprise at least about 0.1 U per 10 μL of solution. In some embodiments, the composition may comprise at most about 2 U per 10 μL of solution. In some embodiments, the composition may comprise at least about 0.01, 0.02, 0.03, 0.04, 0.05, 0.06, 0.07, 0.08, 0.09, 0.1, 0.2, 0.3, 0.4, 0.5, 0.6, 0.7, 0.8, 0.9, 1, 2, 3, 4, 5, 6, 7, 8, 9, or 10 U per 10 μL of solution. In some embodiments, the composition may comprise at most about 0.01, 0.02, 0.03, 0.04, 0.05, 0.06, 0.07, 0.08, 0.09, 0.1, 0.2, 0.3, 0.4, 0.5, 0.6, 0.7, 0.8, 0.9, 1, 2, 3, 4, 5, 6, 7, 8, 9, or 10 U per 10 μL of solution.

[0733] In some embodiments, TIPP may improve the signal to noise ratio of a programmable nuclease-based detection reaction. In some embodiments, TIPP may improve overall signal (e.g., fluorescence of a cleaved reporter as shown in FIG. 164 or intensity of a lateral flow assay strip detection location as shown in FIGS. 165A-165B). TIPP may improve signal by a factor, wherein the signal is indicative of the presence of a target nucleic acid. In some embodiments, the factor may be at least about 1.1. In some embodiments, the factor may be at least about 2. In some embodiments, the factor may be at least about 3. In some embodiments, the factor may be at least about 4. In some embodiments, the factor may be at least about 5. In some embodiments, the factor may be at least about 6. In some embodiments, the factor may be at least about 7. In some embodiments, the factor may be at least about 8. In some embodiments, the factor may be at least about 9. In some embodiments, the factor may be at least about 10.

[0734] In some cases, the TIPP enzyme may be present in the HotPot reaction mix at a concentration of 0.125 Units, 0.5 Units, 0.25 Units, 1.0 Units, 2.0 Units, 2.5 Units, or 4 Units per discrete reaction volume. In some cases, the buffer may comprise the TIPP signal enhancement reagent. Conversely, the TIPP signal enhancement reagent may be provided separately (e.g., in a separate vial in a kit) and added to a reaction mixture at a desired timepoint.

[0735] In some cases, a buffer may comprise a catalytic reagent for signal improvement or enhancement. In some cases, the catalytic reagent may enhance signal generation via hydrolysis of inorganic pyrophosphates. In some cases, the catalytic reagent may enhance signal generation via enhancement of DNA replication. In some cases, the catalytic reagent may enhance signal amplification via revival of Mg⁺² ions in the buffer solution which may otherwise be taken up by the phosphates produced from usage of dNTPs during the LAMP or NEAR reaction (or other isothermal or thermocycling replication reaction described herein). In some cases, the catalytic reagent may enhance signal generation by reviving the concentration of Mg+2 ions in the buffer thereby enhancing the function of the Cas nuclease effector enzyme. In some cases, the catalytic reagent for signal improvement may be an enzyme. In some cases, the catalytic reagent for signal improvement may be a Thermostable Inorganic Pyrophosphatase (TIPP).

### Nicking Enzyme Amplification Reaction (NEAR)

[0736] In some embodiments, a target nucleic acid may be amplified using a nicking enzyme amplification reaction (NEAR). NEAR may be used to amplify a region of a nucleic acid comprising a target nucleic acid. NEAR may comprise a forward primer and a reverse primer that at least partially anneals to complementary strands of a target nucleic acid 3′ of the region to be amplified. The forward primer and the reverse primer may comprise a stabilizing region that is not complementary to the target sequence. The forward primer and the reverse primer may comprise recognition regions that may be nicked by a nicking enzyme. A polymerase may polymerize a nucleic acid 5′ to 3′ from the 3′ end of the forward primer or the 3′ end of the reverse primer, using the strand to which the primer is annealed as a template, resulting in a double stranded nucleic acid product or amplicon. The newly synthesized strand may comprise a restriction site and may then serve as a template. The resulting double stranded nucleic acid amplicon may comprise nicking sites in both strands. A nicking enzyme may nick a single strand of the double stranded product or amplicon. The polymerase may polymerize a nucleic acid 5′ to 3′ from the 3′ end of the nucleic acid amplicon 5′ of the nick. The process may be repeated, thereby amplifying the target nucleic acid.

[0737] As described herein, a target nucleic acid may be detected using a DNA-activated programmable RNA nuclease (e.g., a Cas13), a DNA-activated programmable DNA nuclease (e.g., a Cas12), or an RNA-activated programmable RNA nuclease (e.g., a Cas13) and other reagents disclosed herein (e.g., RNA components). The target nucleic acid may be detected using DETECTR, as described herein. The target nucleic acid may be an RNA, reverse transcribed RNA, DNA, DNA amplicon, amplified DNA, synthetic nucleic acids, or nucleic acids found in biological or environmental samples. In some embodiments, the target nucleic acid is amplified prior to or concurrent with detection. In some embodiments, the target nucleic acid is reverse transcribed prior to amplification. The target nucleic acid may be amplified via NEAR of a target nucleic acid sequence. In some embodiments, the nucleic acid is amplified using NEAR coupled with reverse transcription (RT-NEAR). The NEAR amplification may be performed independently, or the NEAR amplification may be coupled to DETECTR for detection of the target nucleic acid. The RT-NEAR amplification may be performed independently, or the RT-NEAR amplification may be coupled to DETECTR for detection of the target nucleic acid. The DETECTR reaction may be performed using any method consistent with the methods disclosed herein.

[0738] NEAR may be performed as an isothermal reaction, for example NEAR may be performed at from about 37° C. to about 42° C. In some embodiments, NEAR may be performed at from about 15° C. to about 60° C., from about 15° C. to about 55° C., from about 15° C. to about 50° C., from about 15° C. to about 45° C., from about 15° C. to about 40° C., from about 15° C. to about 35° C., from about 15° C. to about 30° C., from about 15° C. to about 25° C., from about 15° C. to about 20° C., from about 20° C. to about 60° C., from about 20° C. to about 55° C., from about 20° C. to about 50° C., from about 20° C. to about 45° C., from about 20° C. to about 40° C., from about 20° C. to about 35° C., from about 20° C. to about 30° C., from about 20° C. to about 25° C., from about 25° C. to about 60° C., from about 25° C. to about 55° C., from about 25° C. to about 50° C., from about 25° C. to about 45° C., from about 25° C. to about 40° C., from about 25° C. to about 35° C., from about 25° C. to about 30° C., from about 30° C. to about 60° C., from about 30° C. to about 55° C., from about 30° C. to about 50° C., from about 30° C. to about 45° C., from about 30° C. to about 40° C., from about 30° C. to about 35° C., from about 35° C. to about 60° C., from about 35° C. to about 55° C., from about 35° C. to about 50° C., from about 35° C. to about 45° C., from about 35° C. to about 40° C., from about 40° C. to about 60° C., from about 40° C. to about 55° C., from about 40° C. to about 50° C., from about 40° C. to about 45° C., from about 45° C. to about 60° C., from about 45° C. to about 55° C., from about 45° C. to about 50° C., from about 50° C. to about 60° C., from about 50° C. to about 55° C., or from about 55° C. to about 60° C. In some embodiments, NEAR may be performed above about 15° C., above about 20° C., above about 25° C., above about 30° C., above about 35° C., above about 40° C., above about 45° C., or above about 50° C. In some embodiments, an SDA reaction may be performed below about 60° C., below about 55° C., below about 50° C., below about 45° C., below about 40° C., below about 35° C., below about 30° C., below about 25° C., below about 20° C., or below about 15° C. In some embodiments, NEAR may be performed at about room temperature. In some embodiments, a nucleic acid sample may be heated prior to isothermal amplification. In some embodiments, the nucleic acid sample heated prior to isothermal amplification may comprise one or more primers. The nucleic acid sample may be heated to about 95° C. prior to isothermal amplification. The nucleic acid sample may be heated to a temperature sufficient to dissociate two strands of a double stranded nucleic acid sequence.

[0739] NEAR may amplify a target nucleic acid to detectable levels within about 30 seconds, 5 minutes, about 10 minutes, about 15 minutes, about 20 minutes, about 25 minutes, about 30 minutes, about 35 minutes, about 40 minutes, about 45 minutes, about 50 minutes, about 55 minutes, or about 60 minutes. NEAR may amplify a target nucleic acid to detectable levels within about 1 hour, about 1.1 hours, about 1.2 hours, about 1.3 hours, about 1.4 hours, about 1.5 hours, about 1.6 hours, about 1.7 hours, about 1.8 hours, about 1.9 hours, about 2 hours, about 2.2 hours, about 2.4 hours, about 2.5 hours, about 2.6 hours, about 2.8 hours, about 3 hours, about 3.5 hours, about 4 hours, about 4.5 hours, or about 5 hours. NEAR may amplify a target nucleic acid to detectable levels within from about 0.1 hours to about 0.5 hours, from about 0.1 hours to about 1 hour, from about 0.1 hours to about 1.5 hours, from about 0.1 hours to about 2 hours, from about 0.1 hours to about 2.5 hours, from about 0.1 hours to about 3 hours, from about 0.1 hours to about 3.5 hours, from about 0.1 hours to about 4 hours, from about 0.1 hours to about 4.5 hours, from about 0.1 hours to about 5 hours, from about 0.5 hours to about 1 hour, from about 0.5 hours to about 1.5 hours, from about 0.5 hours to about 2 hours, from about 0.5 hours to about 2.5 hours, from about 0.5 hours to about 3 hours, from about 0.5 hours to about 3.5 hours, from about 0.5 hours to about 4 hours, from about 0.5 hours to about 4.5 hours, from about 0.5 hours to about 5 hours, from about 1 hour to about 1.5 hours, from about 1 hour to about 2 hours, from about 1 hour to about 2.5 hours, from about 1 hour to about 3 hours, from about 1 hour to about 3.5 hours, from about 1 hour to about 4 hours, from about 1 hour to about 4.5 hours, from about 1 hour to about 5 hours, from about 1.5 hours to about 2 hours, from about 1.5 hours to about 2.5 hours, from about 1.5 hours to about 3 hours, from about 1.5 hours to about 3.5 hours, from about 1.5 hours to about 4 hours, from about 1.5 hours to about 4.5 hours, from about 1.5 hours to about 5 hours, from about 2 hours to about 2.5 hours, from about 2 hours to about 3 hours, from about 2 hours to about 3.5 hours, from about 2 hours to about 4 hours, from about 2 hours to about 4.5 hours, from about 2 hours to about 5 hours, from about 2.5 hours to about 3 hours, from about 2.5 hours to about 3.5 hours, from about 2.5 hours to about 4 hours, from about 2.5 hours to about 4.5 hours, from about 2.5 hours to about 5 hours, from about 3 hours to about 3.5 hours, from about 3 hours to about 4 hours, from about 3 hours to about 4.5 hours, from about 3 hours to about 5 hours, from about 3.5 hours to about 4 hours, from about 3.5 hours to about 4.5 hours, from about 3.5 hours to about 5 hours, from about 4 hours to about 4.5 hours, from about 4 hours to about 5 hours, or from about 4.5 hours to about 5 hours.

### NEAR Amplification and Detection Reaction Mixtures

[0740] NEAR reaction components may comprise a polymerase, a nicking enzyme, dNTPs, and one or more nucleic acid primers. In some embodiments, the reaction may further comprise a reverse transcriptase as described herein. In some embodiments, the polymerase may be an exo-Klenow polymerase. The nicking enzyme may be capable of nicking a single strand of a double stranded nucleic acid sequence. In some embodiments, the nicking enzyme may be capable of nicking an unthiolated strand of a double stranded nucleic acid sequence comprising a thiolated strand and an unthiolated strand. In some embodiments, the nicking enzyme may be capable of nicking a single strand comprising an unthiolated region of a double stranded nucleic acid comprising at one or more thiolated regions and one or more unthiolated regions. In some embodiments, the nicking enzyme is a restriction enzyme capable of nicking a single strand of a double stranded nucleic acid sequence. In some embodiments, the nicking enzyme is a modified restriction enzyme. The nicking enzyme may be a strand-limited restriction enzyme. The restriction enzyme may be HincII. In some embodiments, the restriction enzyme may be AluI, BamHI, EcoP15I, EcoRI, EcoRII, EcoRV, HaeIII, HgaI, HindII, HindIII, HinFI, KpnI, NotI, PstI, PvuII, SacI, SalI, Sau3, ScaI, SmaI, SpeI, SphI, StuI, TaqI, or XbaI, or the like. The nicking enzyme may be Nt.BspQI, Nt.CvPII, Nt.BstNBI, Nb.BsrDI, Nb.BtsI, Nt. AlwI, Nb.BbvCI, Nb.BsmI, Nb.BssSI, Nt. BsmAI, Nb.Bpu10I, Nt. Bpu1101, Nb. Mva1269I, or I-Hmul, or the like. The one or more nucleic acid primers may comprise two primers. For example, the one or more nucleic acid primers may comprise a first primer (e.g., an S1 primer) and a second primer (e.g., an S2 primer). The target nucleic acid may be single stranded DNA or double stranded DNA. In some embodiments, a target nucleic acid comprising RNA may be reverse transcribed into DNA using a reverse transcriptase prior to NEAR amplification. A reverse transcription reaction may comprise primers, dNTPs, and a reverse transcriptase. In some embodiments, the reverse transcription reaction and the NEAR amplification reaction may be performed in the same reaction. A combined RT-NEAR reaction may comprise NEAR primers, reverse transcription primers, dNTPs, a reverse transcriptase, a polymerase, and dNTPs. In some embodiment, the NEAR primers may comprise the reverse transcription primers.

[0741] A DETECTR reaction to detect the target nucleic acid sequence may comprise a guide nucleic acid comprising a segment that is reverse complementary to a segment of the target nucleic acid and a programmable nuclease. The programmable nuclease when activated, as described elsewhere herein, exhibits sequence-independent cleavage of a reporter (e.g., a nucleic acid comprising a moiety that becomes detectable upon cleavage of the nucleic acid by the programmable nuclease). The programmable nuclease is activated upon the guide nucleic acid hybridizing to the target nucleic acid. A combined NEAR DETECTR reaction may comprise a polymerase, a restriction enzyme, dNTPs, one or more nucleic acid primers, a guide nucleic acid, a programmable nuclease, and a substrate nucleic acid. A combined RT-NEAR DETECTR reaction may comprise reverse transcription primers, a reverse transcriptase, a polymerase, a restriction enzyme, dNTPs, one or more nucleic acid primers, a guide nucleic acid, a programmable nuclease, and a substrate nucleic acid. In some embodiment, the primers may comprise the reverse transcription primers. NEAR and DETECTR can be carried out in the same sample volume. NEAR and DETECTR can be carried out concurrently in separate sample volumes or in the same sample volume. RT-NEAR and DETECTR can be carried out in the same sample volume. RT-NEAR and DETECTR can be carried out concurrently in separate sample volumes or in the same sample volume. A NEAR reaction may be multiplexed to amplify a plurality of target nucleic acid sequences in a single reaction.

### NEAR Primers and Guide Nucleic Acids

[0742] A number of NEAR primers and NEAR primer design methods are consistent with the methods compositions, reagents, enzymes, and kits disclosed herein. NEAR may comprise a set of primers. In some embodiments, NEAR may be an RT-NEAR reaction, a NEAR DETECTR reaction, or an RT-NEAR DETECTR reaction. The set of NEAR primers may comprise two primers, a first primer and a second primer. In some embodiments, a first primer may comprise a sequence of the first region at the 3′ end of the first primer. The sequence of the first region may be from about 16 nucleic acids to about 25 nucleic acids long, or about 20 nucleic acids long. The 3′ end of the first primer may hybridize to the first complementary region of the target. The first complementary region may be 3′ of the target nucleic acid. The first complementary region may be 3′ of a sequence reverse complementary to the target nucleic acid. The first primer may further comprise a cut site 5′ of the sequence of the first region that may be recognized and cleaved by a nicking enzyme. The 3′ end of the first primer may further comprise a recognition site for a nicking enzyme. In some embodiments, the 3′ end of the first primer may further comprise a nicking enzyme stabilization region. The sequence of the second region may be from about 30 nucleic acids to about 38 nucleic acids long. The 3′ end of the second primer may hybridize to the second complementary region. The second complementary region may be 3′ of a sequence reverse complementary to the target nucleic acid. The second complementary region may be 3′ of the target nucleic acid. The second complementary region may be 3′ of a sequence reverse complementary to the target nucleic acid. The second primer may further comprise a cut site 5′ of the sequence of the second region that may be recognized and cleaved by a nicking enzyme. The 3′ end of the second primer may further comprise a recognition site for a nicking enzyme. In some embodiments, the 3′ end of the second primer may further comprise a nicking enzyme stabilization region.

[0743] The NEAR primers are designed depending on the site of the optimal guide RNA placement, which may or may not be determined by an available PAM sequence. When performing a NEAR-DETECTR reaction, single-stranded DNA is produced by the designed primers. Because the DETECTR reaction will detection single stranded DNA species, the amplification reaction can be biased to produce more of the particular strand than another. This can be done through changing of the ratio of the forward and reverse primer concentrations. In some embodiments, the concentration of forward primer can be 5 times, 4 times, 3 times, 2 times, or equal to the concentration of reverse primer. In some embodiments, the concentration of reverse primer can be 5 times, 4 times, 3 times, 2 times, or equal to the concentration of forward primer.

[0744] In some embodiments, the first region, the second region, or both may be about 8 nucleic acids, about 10 nucleic acids, about 12 nucleic acids, about 14 nucleic acids, about 16 nucleic acids, about 18 nucleic acids, about 20 nucleic acids, about 22 nucleic acids, about 24 nucleic acids, about 26 nucleic acids, about 28 nucleic acids, about 30 nucleic acids, about 32 nucleic acids, about 34 nucleic acids, about 36 nucleic acids, about 38 nucleic acids, about 40 nucleic acids, about 42 nucleic acids, about 44 nucleic acids, about 46 nucleic acids, about 48 nucleic acids, or about 50 nucleic acids long.

[0745] In some embodiments, the first region, the second region, or both may be from about 8 to about 12, from about 8 to about 16, from about 8 to about 20, from about 8 to about 24, from about 8 to about 28, from about 8 to about 30, from about 8 to about 32, from about 8 to about 34, from about 8 to about 36, from about 8 to about 38, from about 8 to about 40, from about 8 to about 42, from about 8 to about 44, from about 8 to about 48, from about 8 to about 50, from about 12 to about 16, from about 12 to about 20, from about 12 to about 24, from about 12 to about 28, from about 12 to about 30, from about 12 to about 32, from about 12 to about 34, from about 12 to about 36, from about 12 to about 38, from about 12 to about 40, from about 12 to about 42, from about 12 to about 44, from about 12 to about 48, from about 12 to about 50, from about 16 to about 20, from about 16 to about 24, from about 16 to about 28, from about 16 to about 30, from about 16 to about 32, from about 16 to about 34, from about 16 to about 36, from about 16 to about 38, from about 16 to about 40, from about 16 to about 42, from about 16 to about 44, from about 16 to about 48, from about 16 to about 50, from about 20 to about 24, from about 20 to about 28, from about 20 to about 30, from about 20 to about 32, from about 20 to about 34, from about 20 to about 36, from about 20 to about 38, from about 20 to about 40, from about 20 to about 42, from about 20 to about 44, from about 20 to about 48, from about 20 to about 50, from about 24 to about 28, from about 24 to about 30, from about 24 to about 32, from about 24 to about 34, from about 24 to about 36, from about 24 to about 38, from about 24 to about 40, from about 24 to about 42, from about 24 to about 44, from about 24 to about 48, from about 24 to about 50, from about 28 to about 30, from about 28 to about 32, from about 28 to about 34, from about 28 to about 36, from about 28 to about 38, from about 28 to about 40, from about 28 to about 42, from about 28 to about 44, from about 28 to about 48, from about 28 to about 50, from about 30 to about 32, from about 30 to about 34, from about 30 to about 36, from about 30 to about 38, from about 30 to about 40, from about 30 to about 42, from about 30 to about 44, from about 30 to about 48, from about 30 to about 50, from about 32 to about 34, from about 32 to about 36, from about 32 to about 38, from about 32 to about 40, from about 32 to about 42, from about 32 to about 44, from about 32 to about 48, from about 32 to about 50, from about 34 to about 36, from about 34 to about 38, from about 34 to about 40, from about 34 to about 42, from about 34 to about 44, from about 34 to about 48, from about 34 to about 50, from about 36 to about 38, from about 36 to about 40, from about 36 to about 42, from about 36 to about 44, from about 36 to about 48, from about 36 to about 50, from about 38 to about 40, from about 38 to about 42, from about 38 to about 44, from about 38 to about 48, from about 38 to about 50, from about 40 to about 42, from about 40 to about 44, from about 40 to about 48, from about 40 to about 50, from about 42 to about 44, from about 42 to about 48, from about 42 to about 50, from about 44 to about 48, from about 44 to about 50, from about 48 to about 50 nucleic acids long.

[0746] In some embodiments, the first region, the second region, or both may comprise a GC content of about 1%, about 5%, about 10%, about 15%, about 20%, about 25%, about 30%, about 40%, about 50%, about 60%, about 70%, about 80%, about 90%, about 95%, or about 99%. In some embodiments, the first region, the second region, or both may comprise a GC content of from about 1% to about 5%, from about 1% to about 10%, from about 1% to about 15%, from about 1% to about 20%, from about 1% to about 25%, from about 1% to about 30%, from about 1% to about 40%, from about 1% to about 50%, from about 1% to about 60%, from about 1% to about 70%, from about 1% to about 80%, from about 1% to about 90%, from about 1% to about 95%, from about 1% to about 99%, from about 5% to about 10%, from about 5% to about 15%, from about 5% to about 20%, from about 5% to about 25%, from about 5% to about 30%, from about 5% to about 40%, from about 5% to about 50%, from about 5% to about 60%, from about 5% to about 70%, from about 5% to about 80%, from about 5% to about 90%, from about 5% to about 95%, from about 5% to about 99%, from about 10% to about 15%, from about 10% to about 20%, from about 10% to about 25%, from about 10% to about 30%, from about 10% to about 40%, from about 10% to about 50%, from about 10% to about 60%, from about 10% to about 70%, from about 10% to about 80%, from about 10% to about 90%, from about 10% to about 95%, from about 10% to about 99%, from about 15% to about 20%, from about 15% to about 25%, from about 15% to about 30%, from about 15% to about 40%, from about 15% to about 50%, from about 15% to about 60%, from about 15% to about 70%, from about 15% to about 80%, from about 15% to about 90%, from about 15% to about 95%, from about 15% to about 99%, from about 20% to about 25%, from about 20% to about 30%, from about 20% to about 40%, from about 20% to about 50%, from about 20% to about 60%, from about 20% to about 70%, from about 20% to about 80%, from about 20% to about 90%, from about 20% to about 95%, from about 20% to about 99%, from about 25% to about 30%, from about 25% to about 40%, from about 25% to about 50%, from about 25% to about 60%, from about 25% to about 70%, from about 25% to about 80%, from about 25% to about 90%, from about 25% to about 95%, from about 25% to about 99%, from about 30% to about 40%, from about 30% to about 50%, from about 30% to about 60%, from about 30% to about 70%, from about 30% to about 80%, from about 30% to about 90%, from about 30% to about 95%, from about 30% to about 99%, from about 40% to about 50%, from about 40% to about 60%, from about 40% to about 70%, from about 40% to about 80%, from about 40% to about 90%, from about 40% to about 95%, from about 40% to about 99%, from about 50% to about 60%, from about 50% to about 70%, from about 50% to about 80%, from about 50% to about 90%, from about 50% to about 95%, from about 50% to about 99%, from about 60% to about 70%, from about 60% to about 80%, from about 60% to about 90%, from about 60% to about 95%, from about 60% to about 99%, from about 70% to about 80%, from about 70% to about 90%, from about 70% to about 95%, from about 70% to about 99%, from about 80% to about 90%, from about 80% to about 95%, from about 80% to about 99%, from about 90% to about 95%, from about 90% to about 99%, or from about 95% to about 99%.

[0747] In some embodiments, the first region, the second region, or both may have a melting temperature of about 38° C., about 40° C., about 42° C., about 44° C., about 46° C., about 48° C., about 50° C., about 52° C., about 54° C., about 56° C., about 58° C., about 60° C., about 62° C., about 64° C., about 66° C., about 68° C., about 70° C., about 72° C., about 74° C., about 76° C., about 78° C., about 80° C., about 82° C., about 84° C., about 86° C., about 88° C., about 90° C., or about 92° C. In some embodiments, the first region, the second region, or both may have a melting temperature of from about 35° C. to about 40° C., from about 35° C. to about 45° C., from about 35° C. to about 50° C., from about 35° C. to about 55° C., from about 35° C. to about 60° C., from about 35° C. to about 65° C., from about 35° C. to about 70° C., from about 35° C. to about 75° C., from about 35° C. to about 80° C., from about 35° C. to about 85° C., from about 35° C. to about 90° C., from about 35° C. to about 95° C., from about 40° C. to about 45° C., from about 40° C. to about 50° C., from about 40° C. to about 55° C., from about 40° C. to about 60° C., from about 40° C. to about 65° C., from about 40° C. to about 70° C., from about 40° C. to about 75° C., from about 40° C. to about 80° C., from about 40° C. to about 85° C., from about 40° C. to about 90° C., from about 40° C. to about 95° C., from about 45° C. to about 50° C., from about 45° C. to about 55° C., from about 45° C. to about 60° C., from about 45° C. to about 65° C., from about 45° C. to about 70° C., from about 45° C. to about 75° C., from about 45° C. to about 80° C., from about 45° C. to about 85° C., from about 45° C. to about 90° C., from about 45° C. to about 95° C., from about 50° C. to about 55° C., from about 50° C. to about 60° C., from about 50° C. to about 65° C., from about 50° C. to about 70° C., from about 50° C. to about 75° C., from about 50° C. to about 80° C., from about 50° C. to about 85° C., from about 50° C. to about 90° C., from about 50° C. to about 95° C., from about 55° C. to about 60° C., from about 55° C. to about 65° C., from about 55° C. to about 70° C., from about 55° C. to about 75° C., from about 55° C. to about 80° C., from about 55° C. to about 85° C., from about 55° C. to about 90° C., from about 55° C. to about 95° C., from about 60° C. to about 65° C., from about 60° C. to about 70° C., from about 60° C. to about 75° C., from about 60° C. to about 80° C., from about 60° C. to about 85° C., from about 60° C. to about 90° C., from about 60° C. to about 95° C., from about 65° C. to about 70° C., from about 65° C. to about 75° C., from about 65° C. to about 80° C., from about 65° C. to about 85° C., from about 65° C. to about 90° C., from about 65° C. to about 95° C., from about 70° C. to about 75° C., from about 70° C. to about 80° C., from about 70° C. to about 85° C., from about 70° C. to about 90° C., from about 70° C. to about 95° C., from about 75° C. to about 80° C., from about 75° C. to about 85° C., from about 75° C. to about 90° C., from about 75° C. to about 95° C., from about 80° C. to about 85° C., from about 80° C. to about 90° C., from about 80° C. to about 95° C., from about 85° C. to about 90° C., from about 85° C. to about 95° C., or from about 90° C. to about 95° C.

[0748] A set of NEAR primers may be designed for use in combination with a DETECTR reaction. The amplified nucleic acid sequence may comprise a sequence that hybridizes to a guide RNA. The amplified nucleic acid sequence may comprise a target nucleic acid. The guide RNA may hybridize to the target nucleic acid. The amplified nucleic acid sequence may comprise corresponding to a guide RNA. The amplified nucleic acid sequence may comprise a sequence reverse complementary to the target nucleic acid. All or part of the guide RNA may be reverse complementary to all or part of the target nucleic acid. The amplified nucleic acid sequence may comprise a protospacer adjacent motif (PAM) positioned next to or near the target sequence. The PAM may be 3′ of the target nucleic acid. In some embodiments, a portion of a sequence that hybridizes the guide RNA may be located between the first region and the second complementary region. The portion of a sequence that hybridizes the guide RNA located between the first region and the second complementary region may comprise at least 10%, at least 15%, at least 20%, at least 25%, at least 30%, at least 35%, at least 40%, at least 45%, at least 50%, at least 55%, at least 60%, at least 65%, at least 70%, at least 75%, at least 80%, at least 85%, at least 90%, at least 95%, at least 99%, or more of the sequence that hybridizes guide RNA. In some embodiments, the 5′ end of the sequence that hybridizes the guide RNA is 3′ of the 3′ end of the first region and 3′ end of the sequence that hybridizes the guide RNA is 5′ of the 5′ end of the second complementary region. In some embodiments, a portion of a sequence that hybridizes the guide RNA may be located between the second region and the first complementary region. The portion of a sequence that hybridizes the guide RNA located between the second region and the first complementary region may comprise at least 10%, at least 15%, at least 20%, at least 25%, at least 30%, at least 35%, at least 40%, at least 45%, at least 50%, at least 55%, at least 60%, at least 65%, at least 70%, at least 75%, at least 80%, at least 85%, at least 90%, at least 95%, at least 99%, or more of the sequence that hybridizes the guide RNA. In some embodiments, the 5′ end of the sequence that hybridizes the guide RNA is 3′ of the 3′ end of the second region and 3′ end of the sequence that hybridizes the guide RNA is 5′ of the 5′ end of the first complementary region.

[0749] In some embodiments, a sequence that hybridizes the guide RNA may overlap the first region, the first complementary region, the second region, or the second complementary region by no more than no more than about 5%, no more than about 10%, no more than about 15%, no more than about 20%, no more than about 25%, no more than about 30%, no more than about 35%, no more than about 40%, no more than about 45%, no more than about 50%, no more than about 55%, no more than about 60%, no more than about 65%, no more than about 70%, no more than about 75%, no more than about 80%, no more than about 85%, no more than about 90%, or no more than about 95%. In some embodiments, the sequence that hybridizes the guide RNA does not overlap the first region, the first complementary region, the second region, or the second complementary region. In some embodiments, the guide RNA does not hybridize to the first primer or the second primer.

[0750] In some embodiments, a NEAR primer set may be designed using a commercially available primer design software. A NEAR primer set may be designed for use in combination with a DETECR reaction, a reverse transcription reaction, or both. One or more methods of designing a set of NEAR primers may be readily apparent to one skilled in the art and may be employed in any of the compositions, kits and methods described herein.

TABLE 5
Exemplary NEAR Primers

| | PRIMER | ALTERNATIVE | |
|---|---|---|---|
| SEQ ID NO: | NAME | NAME | SEQUENCE |
| SEQ ID NO: 35 | M2805 | COV2-M1 | TTGCTTTCGTGGTATT |
| SEQ ID NO: 36 | M2811 | COV2-M2 | GGATGGCTAGTGTAA |
| SEQ ID NO: 37 | R1763 F8 | COV2-F8 | TTTGCCCCCAGCGCTT |
| SEQ ID NO: 38 | R1763 R8 | COV2-R8 | ATGCGCGACATTCCGA |
| SEQ ID NO: 39 | R1763 F7 | COV2-F7 | ATTTGCCCCCAGCGCT |
| SEQ ID NO: 40 | R1763 R7 | COV2-R7 | TGCGCGACATTCCGAA |
| SEQ ID NO: 41 | R1763 F6 | COV2-F6 | AATTTGCCCCCAGCGC |
| SEQ ID NO: 42 | R1763 R6 | COV2-R6 | GCGCGACATTCCGAAG |
| SEQ ID NO: 43 | R1763 F5 | COV2-F5 | CAATTTGCCCCCAGCG |
| SEQ ID NO: 44 | R1763 R5 | COV2-R5 | CGCGACATTCCGAAGA |
| SEQ ID NO: 45 | R1763 F4 | COV2-F4 | ACAATTTGCCCCCAGC |
| SEQ ID NO: 46 | R1763 R4 | COV2-R4 | GCGACATTCCGAAGAA |
| SEQ ID NO: 47 | R1763 F3 | COV2-F3 | CACAATTTGCCCCCAG |
| SEQ ID NO: 48 | R1763 R3 | COV2-R3 | CGACATTCCGAAGAAC |
| SEQ ID NO: 49 | R1763 F2 | COV2-F2 | TCACAATTTGCCCCCA |
| SEQ ID NO: 50 | R1763 R2 | COV2-R2 | GACATTCCGAAGAACG |
| SEQ ID NO: 51 | R1763 F1 | COV2-F1 | TTCACAATTTGCCCCC |
| SEQ ID NO: 52 | R1763 R1 | COV2-R1 | ACATTCCGAAGAACGC |
| SEQ ID NO: 53 | EXAMPLE | EXAMPLE PRIMER | TAGCCAAACAGGAACA |
| | PRIMER 1F | 1F | |
| SEQ ID NO: 54 | EXAMPLE | EXAMPLE PRIMER | GCCAGCAATCTGAGGA |
| | PRIMER 2R | 2R | |

TABLE 6
Exemplary Guides

| | | ALTERNATIVE | |
|---|---|---|---|
| SEQ ID NO: | GUIDE NAME | NAME | Sequence |
| SEQ ID NO: 55 | R1763 | COV2-G1 | TTTGCCCCCAGCGCTTCAGC |
| | | | GTTC |
| SEQ ID NO: 56 | R1765 | COV2-G2 | TTTCGTGGTATTGCTAGTTAC |
| SEQ ID NO: 57 | EXAMPLE | EXAMPLE | CAATCTGAGGAGAGGCCATA |
| | GUIDE 19 | GUIDE 19 | |
| SEQ ID NO: 58 | EXAMPLE | EXAMPLE | AATCTGAGGAGAGGCCATAC |
| | GUIDE 18 | GUIDE 18 | |
| SEQ ID NO: 59 | EXAMPLE | EXAMPLE | ATCTGAGGAGAGGCCATACT |
| | GUIDE 17 | GUIDE 17 | |
| SEQ ID NO: 60 | EXAMPLE | EXAMPLE | TCTGAGGAGAGGCCATACTT |
| | GUIDE16 | GUIDE16 | |
| SEQ ID NO: 61 | EXAMPLE | EXAMPLE | CTGAGGAGAGGCCATACTTG |
| | GUIDE 15 | GUIDE 15 | |
| SEQ ID NO: 62 | EXAMPLE | EXAMPLE | TGAGGAGAGGCCATACTTGT |
| | GUIDE 14 | GUIDE 14 | |
| SEQ ID NO: 63 | EXAMPLE | EXAMPLE | GAGGAGAGGCCATACTTGTT |
| | GUIDE 13 | GUIDE 13 | |
| SEQ ID NO: 64 | EXAMPLE | EXAMPLE | AGGAGAGGCCATACTTGTTC |
| | GUIDE 12 | GUIDE 12 | |
| SEQ ID NO: 65 | EXAMPLE | EXAMPLE | GGAGAGGCCATACTTGTTCC |
| | GUIDE 11 | GUIDE 11 | |
| SEQ ID NO: 66 | EXAMPLE | EXAMPLE | GAGAGGCCATACTTGTTCCT |
| | GUIDE 10 | GUIDE 10 | |
| SEQ ID NO: 67 | EXAMPLE | EXAMPLE | AGAGGCCATACTTGTTCCTG |
| | GUIDE 9 | GUIDE 9 | |
| SEQ ID NO: 68 | EXAMPLE | EXAMPLE | GAGGCCATACTTGTTCCTGT |
| | GUIDE 8 | GUIDE 8 | |
| SEQ ID NO: 69 | EXAMPLE | EXAMPLE | AGGCCATACTTGTTCCTGTT |
| | GUIDE 7 | GUIDE 7 | |
| SEQ ID NO: 70 | EXAMPLE | EXAMPLE | GGCCATACTTGTTCCTGTTT |
| | GUIDE 6 | GUIDE 6 | |
| SEQ ID NO: 71 | EXAMPLE | EXAMPLE | GCCATACTTGTTCCTGTTTG |
| | GUIDE 5 | GUIDE 5 | |
| SEQ ID NO: 72 | EXAMPLE | EXAMPLE | CCATACTTGTTCCTGTTTGG |
| | GUIDE 4 | GUIDE 4 | |
| SEQ ID NO: 73 | EXAMPLE | EXAMPLE | CATACTTGTTCCTGTTTGGC |
| | GUIDE 3 | GUIDE 3 | |
| SEQ ID NO: 74 | EXAMPLE | EXAMPLE | ATACTTGTTCCTGTTTGGCT |
| | GUIDE 2 | GUIDE 2 | |
| SEQ ID NO: 75 | EXAMPLE | EXAMPLE | TACTTGTTCCTGTTTGGCTA |
| | GUIDE 1 | GUIDE 1 | |
| SEQ ID NO: 76 | R1107 | | UAAUUUCUACUAAGUGUAG |
| | | | AUUAGGUCAACAUGCAGCU |
| | | | ACA |
| SEQ ID NO: 77 | R1790 | | GCCACCCCAAAAAUGAAGG |
| | | | GGACUAAAACAUAGGUCAA |
| | | | CAUGCAGCUACA |
| SEQ ID NO: 78 | R1791 | | GCCACCCCAAAAAUGAAGG |
| | | | GGACUAAAACAGUAGGUCA |
| | | | ACAUGCAGCUAC |
| SEQ ID NO: 79 | R1792 | | GCCACCCCAAAAAUGAAGG |
| | | | GGACUAAAACAGGUCAACA |
| | | | UGCAGCUACAGG |
| SEQ ID NO: 80 | R1793 | | GACGAAUGAAGGAAUGCAA |
| | | | CUAGGUCAACAUGCAGCUA |
| | | | CA |
| SEQ ID NO: 81 | R1794 | | GACGAAUGAAGGAAUGCAA |
| | | | CGUAGGUCAACAUGCAGCU |
| | | | AC |
| SEQ ID NO: 82 | R1795 | | GACGAAUGAAGGAAUGCAA |
| | | | CGGUCAACAUGCAGCUACA |
| | | | GG |
| SEQ ID NO: 83 | Cas14a.1 | | Cas14a.1 |
| | tracrRNA-2 | | |

### Amplification and Detection of a Gene of Interest

[0751] A DETECTR reaction may be used to detect the presence of a specific target gene in the same. The DETECTR reaction may produce a detectable signal, as described elsewhere herein, in the presence of a target nucleic acid sequence comprising a target gene. The DETECTR reaction may not produce a signal in the absence of the target nucleic acid or in the presence of a nucleic acid sequence that does not comprise the specific SNP allele or comprises a different SNP allele. In some embodiments, a DETECTR reaction may comprise a guide RNA reverse complementary to a portion of a target nucleic acid sequence comprising a specific SNP allele. The guide RNA and the target nucleic acid comprising the specific SNP allele may bind to and activate a programmable nuclease, thereby producing a detectable signal as described elsewhere herein. The guide RNA and a nucleic acid sequence that does not comprise the specific SNP allele may not bind to or activate the programmable nuclease and may not produce a detectable signal. In some embodiments, a target nucleic acid sequence that may or may not comprise a specific SNP allele may be amplified using, for example, a LAMP amplification reaction, an RPA amplification reaction, an SDA amplification reaction, a NEAR amplification reaction, or any other amplification method. In some embodiments, the amplification reaction may be combined with a reverse transcription reaction, a DETECTR reaction, or both. For example, the amplification reaction may be an RT-NEAR reaction, a NEAR DETECTR reaction, or an RT-NEAR DETECTR reaction. In some embodiments, the target nucleic acid sequence can comprise a SNP. In some embodiments, the target nucleic acid sequence can comprise a sequence indicative of a human disease.

[0752] A DETECTR reaction, as described elsewhere herein, may produce a detectable signal specifically in the presence of a target nucleic acid sequence comprising a target gene. In addition to the DETECTR reaction, the target nucleic acid having the target gene may be concurrently, sequentially, concurrently together in a sample, or sequentially together in a sample be carried out alongside NEAR or RT-NEAR. For example, the reactions can comprise NEAR and DETECTR reactions, or RT-NEAR and DETECTR reactions. Performing a DETECTR reaction in combination with a NEAR reaction may result in an increased detectable signal as compared to the DETECTR reaction in the absence of the NEAR reaction. In some embodiments, the target nucleic acid sequence can comprise a SNP. In some embodiments, the target nucleic acid sequence can comprise a sequence indicative of a human disease.

[0753] In some embodiments, the detectable signal produced in the DETECTR reaction may be higher in the presence of a target nucleic acid comprising target nucleic acid than in the presence of a nucleic acid that does not comprise the target nucleic acid. In some embodiments, the DETECTR reaction may produce a detectable signal that is at least 1-fold, at least 2-fold, at least 3-fold, at least 4-fold, at least 5-fold, at least 10-fold, at least 20-fold, at least 30-fold, at least 40-fold, at least 50-fold, at least 100-fold, at least 200-fold, at least 300-fold, at last 400-fold, at least 500-fold, at least 1000-fold, at least 2000-fold, at least 3000-fold, at least 4000-fold, at least 5000-fold, at least 6000-fold, at least 7000-fold, at least 8000-fold, at least 9000-fold, at least 10000-fold, at least 50000-fold, at least 100000-fold, at least 500000-fold, or at least 1000000-fold greater in the presence of a target nucleic acid comprising a target nucleic acid than in the presence of a nucleic acid that does not comprise the target nucleic acid. In some embodiments, the DETECTR reaction may produce a detectable signal that is from 1-fold to 2-fold, from 2-fold to 3-fold, from 3-fold to 4-fold, from 4-fold to 5-fold, from 5-fold to 10-fold, from 10-fold to 20-fold, from 20-fold to 30-fold, from 30-fold to 40-fold, from 40-fold to 50-fold, from 50-fold to 100-fold, from 100-fold to 500-fold, from 500-fold to 1000-fold, from 1000-fold to 10,000-fold, from 10,000-fold to 100,000-fold, or from 100,000-fold to 1,000,000-fold greater in the presence of a target nucleic acid comprising a specific SNP allele than in the presence of a nucleic acid that does not comprise the specific SNP allele. In some embodiments, the target nucleic acid sequence can comprise a SNP. In some embodiments, the target nucleic acid sequence can comprise a sequence indicative of a human disease.

[0754] A DETECTR reaction may be used to detect the presence of a target nucleic acid associated with a disease or a condition in a nucleic acid sample. The DETECTR reaction may reach signal saturation within about 30 seconds, about 5 minutes, about 10 minutes, about 15 minutes, about 20 minutes, about 25 minutes, about 30 minutes, about 35 minutes, about 40 minutes, about 45 minutes, about 50 minutes, about 55 minutes, about 60 minutes, about 65 minutes, about 75 minutes, about 80 minutes, or about 85 minutes and be used to detect the presence of a target gene associated with an increased likelihood of developing a disease or a condition in a nucleic acid sample. The DETECTR reaction may be used to detect the presence of a target gene associated with a phenotype in a nucleic acid sample. For example, a DETECTR reaction may be used to detect target gene associated with a disease such as phenylketonuria (PKU), cystic fibrosis, sickle-cell anemia, albinism, Huntington's disease, myotonic dystrophy type 1, hypercholesterolemia, neurofibromatosis, polycystic kidney disease, hemophilia, muscular dystrophy, hypophosphatemic rickets, Rett's syndrome, or spermatogenic failure. A DETECTR reaction may be used to detect a SNP allele associated with an increased risk of cancer, for example bladder cancer, brain cancer, breast cancer, cervical cancer, colon cancer, colorectal cancer, gallbladder cancer, stomach cancer, leukemia, liver cancer, lung cancer, oral cancer, esophageal cancer, ovarian cancer, pancreatic cancer, prostate cancer, skin cancer, testicular cancer, thyroid cancer, neuroblastoma, or lymphoma. A DETECTR reaction may be used to detect a SNP allele associated with an increased risk of a disease, for example Alzheimer's disease, Parkinson's disease, amyloidosis, heterochromatosis, celiac disease, macular degeneration, or hypercholesterolemia. A DETECTR reaction may be used to detect a SNP allele associated with a phenotype, for example, eye color, hair color, height, skin color, race, alcohol flush reaction, caffeine consumption, deep sleep, genetic weight, lactose intolerance, muscle composition, saturated fat and weight, or sleep movement. A DETECTR reaction may also be used to detect the presence of a pathological organism. In some embodiments, the pathological organism is a prokaryote, eukaryote, or a protozoa. In some embodiments, the pathological organism is a virus, an opportunistic pathogen, a parasite, a bacterium, or any combination thereof. In some embodiments, the pathological organism is SARS-CoV-2 or Streptococcus pyogenes.

[0755] The terms “sample interface”, “sample input”, “input port”, “input”, “port” as used herein, generally refers to a portion of a device that is configured to receive a sample.

[0756] The terms “heating region”, “heated region”, “heat chambers”, “heat volumes”, “heat zones”, “heat surfaces”, “heat areas”, and the like, as used herein, generally refers to a portion of a device that is in thermal communication with a heating unit.

[0757] The terms “heater”, “heating unit”, “heating element”, “heat source”, and the like, as used herein, generally refers to an element that is configured to produce heat and is in thermal communication with a portion of a device.

[0758] The term “reagent mix”, “reagent master mix”, “reagents”, and the like, as used herein, generally refers to a formulation comprising one or more chemicals that partake in a reaction that the reagent mix is formulated for.

[0759] The term “non-cycled temperature profile,” as used herein, generally refers to a temperature profile that is cyclical or sinusoidal in that the temperature profile has an initial temperature, a target temperature, and a final temperature.

[0760] The term “capture probe”, “capture molecule”, and the like, as used herein, generally refers to a molecule that selectively binds to a target nucleic acid and only nonspecifically binds to other nucleic acids that can be washed away.

[0761] The term “collection tube,” as used herein, generally refers to a compartment that is used to collect a sample and deliver the sample to the sample interface of a device. In some embodiments, the collection tube may be portable. In some embodiments, the collection tube is a syringe.

[0762] As used herein in the specification and claims, including as used in the examples and unless otherwise expressly specified, all numbers may be read as if prefaced by the word “about” or “approximately,” even if the term does not expressly appear. The phrase “about” or “approximately” may be used when describing magnitude and/or position to indicate that the value and/or position described is within a reasonable expected range of values and/or positions. For example, a numeric value may have a value that is +/−0.1% of the stated value (or range of values), +/−1% of the stated value (or range of values), +/−2% of the stated value (or range of values), +/−5% of the stated value (or range of values), or +/−10% of the stated value (or range of values). Any numerical values given herein should also be understood to include about or approximately that value, unless the context indicates otherwise. For example, if the value “10” is disclosed, then “about 10” is also disclosed. Any numerical range recited herein is intended to include all sub-ranges subsumed therein. It is also understood that the throughout the application, data is provided in a number of different formats, and that this data, represents endpoints and starting points, and ranges for any combination of the data points.

[0763] As used herein, the terms “thermostable” and “thermostability” refer to the stability of a composition disclosed herein at one or more temperatures, such as an elevated operating temperature for a given reaction. Stability may be assessed by the ability of the composition to perform an activity, e.g., cleaving a target nucleic acid or reporter. Improving thermostability means improving the quantity or quality of the activity at one or more temperatures.

[0764] As used herein, the terms “percent identity,” “% identity,” and “% identical” refer to the extent to which two sequences (nucleotide or amino acid) have the same residue at the same positions in an alignment. For example, “an amino acid sequence is X % identical to SEQ ID NO: Y” refers to % identity of the amino acid sequence to SEQ ID NO: Y and is elaborated as X % of residues in the amino acid sequence are identical to the residues of sequence disclosed in SEQ ID NO: Y in an alignment between the two. Generally, computer programs may be employed for such calculations. Illustrative programs that compare and align pairs of sequences, include ALIGN (Myers and Miller, Comput Appl Biosci. 1988 Mar.; 4 (1): 11-7), FASTA (Pearson and Lipman, Proc Natl Acad Sci USA. 1988 Apr; 85 (8): 2444-8; Pearson, Methods Enzymol. 1990; 183:63-98) and gapped BLAST (Altschul et al., Nucleic Acids Res. 1997 Sep. 1; 25 (17): 3389-40), BLASTP, BLASTN, or GCG (Devereux et al., Nucleic Acids Res. 1984 Jan. 11; 12 (1 Pt 1): 387-95). For the purposes of calculating identity to the sequence, extensions, such as tags, are not included.

[0765] As used herein, a “one-pot” reaction refers to a reaction in which more than one reaction occurs in a single volume alongside a programmable nuclease-based detection (e.g., DETECTR) assay. For example, in a one-pot assay, sample preparation, reverse transcription, amplification, in vitro transcription, or any combination thereof, and programmable nuclease-based detection (e.g., DETECTR) assays are carried out in a single volume. In some embodiments, amplification and detection are carried out within a same volume or region of a device (e.g., within a detection region). Readout of the detection (e.g., DETECTR) assay may occur in the single volume or in a second volume. For example, the product of the one-pot DETECTR reaction (e.g., a cleaved detection moiety comprising an enzyme) may be transferred to another volume (e.g., a volume comprising an enzyme substrate) for signal generation and indirect detection of reporter cleavage by a sensor or detector (or by eye in the case of a colorimetric signal).

[0766] As used herein, “HotPot” refers to a one-pot reaction in which both amplification (e.g., RT-LAMP) and detection (e.g., DETECTR) reactions occur simultaneously. In many embodiments, a HotPot reaction may utilize a thermostable programmable nuclease which exhibits trans cleavage at elevated temperatures (e.g., greater than 37C).

[0767] The terms, “amplification” and “amplifying,” as used herein, refer to a process by which a nucleic acid molecule is enzymatically copied to generate a plurality of nucleic acid molecules containing the same sequence as the original nucleic acid molecule or a distinguishable portion thereof.

[0768] The term, “complementary,” as used herein with reference to a nucleic acid refers to the characteristic of a polynucleotide having nucleotides that base pair with their Watson-Crick counterparts (C with G; or A with T/U) in a reference nucleic acid. For example, when every nucleotide in a polynucleotide forms a base pair with a reference nucleic acid, that polynucleotide is said to be 100% complementary to the reference nucleic acid. In a double stranded DNA or RNA sequence, the upper (sense) strand sequence is in general, understood as going in the direction from its 5′- to 3′-end, and the complementary sequence is thus understood as the sequence of the lower (antisense) strand in the same direction as the upper strand. Following the same logic, the reverse sequence is understood as the sequence of the upper strand in the direction from its 3′- to its 5′-end, while the ‘reverse complement’ sequence or the ‘reverse complementary’ sequence is understood as the sequence of the lower strand in the direction of its 5′- to its 3′-end. Each nucleotide in a double stranded DNA or RNA molecule that is paired with its Watson-Crick counterpart called its complementary nucleotide.

[0769] The term, “cleavage assay,” as used herein refers to an assay designed to visualize, quantitate or identify cleavage of a nucleic acid. In some cases, the cleavage activity may be cis-cleavage activity. In some cases, the cleavage activity may be trans-cleavage activity.

[0770] Assays which leverage the transcollateral cleavage properties of programmable nuclease enzymes (e.g., CRISPR-Cas enzymes) are often referred to herein as DNA endonuclease targeted CRISPR trans reporter (DETECTR) reactions. As used herein, detection of reporter cleavage (directly or indirectly) to determine the presence of a target nucleic acid sequence may be referred to as “DETECTR”.

[0771] The term, “detectable signal,” as used herein refers to a signal that can be detected using optical, fluorescent, chemiluminescent, electrochemical or other detection methods known in the art.

[0772] The term, “detecting a nucleic acid” and its grammatical equivalents, as used herein refers to detecting the presence or absence of the target nucleic acid in a sample that potentially contains the nucleic acid being detected.

[0773] The term, “effector protein,” as used herein refers to a protein, polypeptide, or peptide that non-covalently binds to a guide nucleic acid to form a complex that contacts a target nucleic acid, wherein at least a portion of the guide nucleic acid hybridizes to a target sequence of the target nucleic acid. In some embodiments, the complex comprises multiple effector proteins. In some embodiments, the effector protein modifies the target nucleic acid when the complex contacts the target nucleic acid. In some embodiments, the effector protein does not modify the target nucleic acid, but it is fused to a fusion partner protein that modifies the target nucleic acid. A non-limiting example of modifying a target nucleic acid is cleaving (hydrolysis) of a phosphodiester bond. Additional examples of modifying target nucleic acids are described herein and throughout. In some embodiments, the term, “effector protein” refers to a protein that is capable of modifying a nucleic acid molecule (e.g., by cleavage, deamination, recombination). Modifying the nucleic acid may modulate the expression of the nucleic acid molecule (e.g., increasing or decreasing the expression of a nucleic acid molecule). The effector protein may be a Cas protein (i.e., an effector protein of a CRISPR-Cas system).

[0774] The term, “guide nucleic acid,” as used herein refers to a nucleic acid comprising: a first nucleotide sequence that hybridizes to a target nucleic acid; and a second nucleotide sequence that is capable of being non-covalently bound by an effector protein. The first sequence may be referred to herein as a spacer sequence. The second sequence may be referred to herein as a repeat sequence. In some embodiments, the first sequence is located 5′ of the second nucleotide sequence. In some embodiments, the first sequence is located 3′ of the second nucleotide sequence.

[0775] The terms, “non-naturally occurring” and “engineered,” as used herein are used interchangeably and indicate the involvement of human intervention. The terms, when referring to a nucleic acid, nucleotide, protein, polypeptide, peptide or amino acid, refer to a nucleic acid, nucleotide, protein, polypeptide, peptide or amino acid that is at least substantially free from at least one other feature with which it is naturally associated in nature and as found in nature, and/or contains a modification (e.g., chemical modification, nucleotide sequence, or amino acid sequence) that is not present in the naturally occurring nucleic acid, nucleotide, protein, polypeptide, peptide, or amino acid. The terms, when referring to a composition or system described herein, refer to a composition or system having at least one component that is not naturally associated with the other components of the composition or system. By way of a non-limiting example, a composition may include an effector protein and a guide nucleic acid that do not naturally occur together. Conversely, and as a non-limiting further clarifying example, an effector protein or guide nucleic acid that is “natural,” “naturally-occurring,” or “found in nature” includes an effector protein and a guide nucleic acid from a cell or organism that have not been genetically modified by human intervention.

[0776] The term, “protospacer adjacent motif (PAM),” as used herein refers to a nucleotide sequence found in a target nucleic acid that directs an effector protein to modify the target nucleic acid at a specific location. A PAM sequence may be required for a complex having an effector protein and a guide nucleic acid to hybridize to and modify the target nucleic acid. However, a given effector protein may not require a PAM sequence being present in a target nucleic acid for the effector protein to modify the target nucleic acid.

[0777] The terms, “reporter” and “reporter nucleic acid,” are used interchangeably herein to refer to a non-target nucleic acid molecule that can provide a detectable signal upon cleavage by an effector protein. Examples of detectable signals and detectable moieties that generate detectable signals are provided herein.

[0778] The term, “sample,” as used herein generally refers to something comprising a target nucleic acid. In some instances, the sample is a biological sample, such as a biological fluid or tissue sample. In some instances, the sample is an environmental sample. The sample may be a biological sample or environmental sample that is modified or manipulated. By way of non-limiting example, samples may be modified or manipulated with purification techniques, heat, nucleic acid amplification, salts and buffers.

[0779] The term, “target nucleic acid,” as used herein refers to a nucleic acid that is selected as the nucleic acid for modification, binding, hybridization or any other activity of or interaction with a nucleic acid, protein, polypeptide, or peptide described herein. A target nucleic acid may comprise RNA, DNA, or a combination thereof. A target nucleic acid may be single-stranded (e.g., single-stranded RNA or single-stranded DNA) or double-stranded (e.g., double-stranded DNA).

[0780] The term, “target sequence,” as used herein when used in reference to a target nucleic acid refers to a sequence of nucleotides that hybridizes to a portion (preferably an equal length portion) of a guide nucleic acid. Hybridization of the guide nucleic acid to the target sequence may bring an effector protein into contact with the target nucleic acid.

[0781] The section headings used herein are for organizational purposes only and are not to be construed as limiting the subject matter described.

### ILLUSTRATIVE EMBODIMENTS

[0782] The present disclosure provides the following illustrative embodiments.

[0783] Embodiment 1. A device for detecting a target nucleic acid, the device comprising:
[0784] a sample interface configured to receive a sample;
[0785] a first sample chamber in fluid communication with the sample interface and configured to hold a first predetermined volume of the sample;
[0786] a first reaction chamber in fluid communication with the first sample chamber and comprising a first set of amplification reagents and a first set of detection reagents, wherein the first set of amplification reagents are configured to amplify a first target nucleic acid, wherein the first set of detection reagents comprises a first programmable nuclease, a first guide nucleic acid configured to bind to the first target nucleic acid, and a first reporter configured to release a first detection moiety when cleaved by the first programmable nuclease following binding of the first guide nucleic acid to the first target nucleic acid;
[0787] a first valve disposed between the first sample chamber and the first reaction chamber and configured to regulate flow therebetween;
[0788] a first lateral flow assay strip configured to be inserted into the first reaction chamber and capture the first detection moiety when released and thereby detect a presence or absence of the first target nucleic acid in the sample;
[0789] a second sample chamber in fluid communication with the sample interface and configured to hold a second predetermined volume of the sample;
[0790] a second reaction chamber in fluid communication with the second sample chamber and comprising a second set of amplification reagents and a second set of detection reagents, wherein the second set of amplification reagents are configured to amplify a second target nucleic acid, wherein the second set of detection reagents comprises a second programmable nuclease, a second guide nucleic acid configured to bind to the second target nucleic acid, and a second reporter configured to release a second detection moiety when cleaved by the second programmable nuclease following binding of the second guide nucleic acid to the second target nucleic acid;
[0791] a second valve disposed between the second sample chamber and second first reaction chamber and configured to regulate flow therebetween; and
[0792] a second lateral flow assay strip configured to be inserted into the second reaction chamber and capture the second detection moiety when released and thereby detect a presence or absence of the second target nucleic acid in the sample, wherein the first and second reaction chambers are fluidly independent of one another.

[0793] Embodiment 2. A method for detecting a plurality of target nucleic acids, the method comprising:
[0794] applying the sample to the sample interface of the device of Embodiment 1;
[0795] transferring the first predetermined volume of the sample into the first sample chamber;
[0796] transferring the second predetermined volume of the sample into the second sample chamber;
[0797] transferring the first predetermined volume from the first sample chamber to the first reaction chamber;
[0798] transferring the second predetermined volume from the second sample chamber to the second reaction chamber;
[0799] amplifying the first target nucleic acid in the first reaction chamber;
[0800] amplifying the second target nucleic acid in the second reaction chamber;
[0801] binding the first target nucleic acid with the first guide nucleic acid, thereby cleaving the first detection moiety from the first reporter in the first reaction chamber;
[0802] binding the second target nucleic acid with the second guide nucleic acid, thereby cleaving the second detection moiety from the second reporter in the second reaction chamber;
[0803] inserting the first lateral flow assay strip into the first reaction chamber;
[0804] inserting the second lateral flow assay strip into the second reaction chamber;
[0805] capturing the first detection moiety with the first lateral flow assay strip, thereby detecting the presence of the first target nucleic acid; and
[0806] capturing the second detection moiety with the second lateral flow assay strip, thereby detecting the presence of the second target nucleic acid.

[0807] Embodiment 3. A device for detecting a target nucleic acid, the device comprising:
[0808] a sample interface configured to receive a sample;
[0809] a first reaction chamber in fluid communication with the sample interface and comprising a first set of amplification reagents and a first set of detection reagents, wherein the first set of amplification reagents are configured to amplify a first target nucleic acid, wherein the first set of detection reagents comprises a first programmable nuclease, a first guide nucleic acid configured to bind to the first target nucleic acid, and a first reporter configured to release a first detection moiety when cleaved by the first programmable nuclease following binding of the first guide nucleic acid to the first target nucleic acid;
[0810] a first lateral flow assay strip in fluid communication with the first reaction chamber and configured to capture the first detection moiety when released and thereby detect a presence or absence of the first target nucleic acid in the sample;
[0811] a second reaction chamber in fluid communication with the sample interface and comprising a second set of amplification reagents and a second set of detection reagents, wherein the second set of amplification reagents are configured to amplify a second target nucleic acid, wherein the second set of detection reagents comprises a second programmable nuclease, a second guide nucleic acid configured to bind to the second target nucleic acid, and a second reporter configured to release a second detection moiety when cleaved by the second programmable nuclease following binding of the second guide nucleic acid to the second target nucleic acid; and
[0812] a second lateral flow assay strip in fluid communication with the second reaction chamber and configured to capture the second detection moiety when released and thereby detect a presence or absence of the second target nucleic acid in the sample,
[0813] wherein the first and second reaction chambers are fluidly independent of one another.

[0814] Embodiment 4. A device for detecting a target nucleic acid, comprising:
[0815] a sample interface configured to receive a sample;
[0816] a reaction chamber in fluid communication with the sample interface;
[0817] a programmable nuclease and a guide nucleic acid disposed within the reaction chamber, the guide nucleic acid being configured to bind to a target nucleic acid;
[0818] a polymer matrix disposed within the reaction chamber, wherein the polymer matrix comprises a plurality of reporters co-polymerized with at least a first plurality of oligomers,
[0819] wherein each of the plurality of reporters is configured to release a detection moiety when cleaved by the programmable nuclease following binding of the guide nucleic acid to the target nucleic acid, and
[0820] wherein release of the detection moiety is indicative of a presence or absence of the target nucleic acid.

[0821] Embodiment 5. A device for detecting a target nucleic acid, the device comprising:
[0822] a sample interface configured to receive a sample;
[0823] a first vertical reaction chamber in fluid communication with the sample interface and comprising a first set of amplification reagents and a first set of detection reagents, wherein the first set of amplification reagents are configured to amplify a first target nucleic acid, wherein the first set of detection reagents comprises a first programmable nuclease, a first guide nucleic acid configured to bind to the first target nucleic acid, and a first reporter configured to release a first detection moiety when cleaved by the first programmable nuclease following binding of the first guide nucleic acid to the first target nucleic acid;
[0824] a heating reservoir surrounding the first vertical reaction chamber, the heating reservoir configured to heat the first vertical reaction chamber when activated; and
[0825] a first lateral flow assay strip disposed at an angle relative to the first vertical reaction chamber and configured to be moved from a first position into a second position in fluid communication with the first reaction chamber, wherein, when in the second position, the first lateral flow assay strip is configured to capture the first detection moiety when released and thereby detect a presence or absence of the first target nucleic acid in the sample.

[0826] Embodiment 6. A device for detecting a target nucleic acid, comprising:
[0827] a sample interface configured to receive a sample;
[0828] a reaction chamber in fluid communication with the sample interface, wherein the reaction chamber comprises a plurality of reporters and thermostable inorganic pyrophosphatase;
[0829] a programmable nuclease and a guide nucleic acid disposed within the reaction chamber, the guide nucleic acid being configured to bind to a target nucleic acid;
[0830] wherein each of the plurality of reporters is configured to release a detection moiety when cleaved by the programmable nuclease following binding of the guide nucleic acid to the target nucleic acid, and
[0831] wherein release of the detection moiety is indicative of a presence or absence of the target nucleic acid.

[0832] Embodiment 7. A device for detecting a target nucleic acid, comprising:
[0833] a sample interface configured to receive a sample;
[0834] a first reaction chamber in fluid communication with the sample interface, wherein the first reaction chamber comprises amplification reagents configured to amplify the sample, said amplification reagents comprising a forward primer, a reverse primer, dNTPs, a DNA polymerase, and a nicking endonuclease;
[0835] a second reaction chamber in fluid communication with the first reaction chamber, wherein the second reaction chamber comprises a plurality of reporters;
[0836] a programmable nuclease and a guide nucleic acid disposed within the second reaction chamber, the guide nucleic acid being configured to bind to a target nucleic acid;
[0837] wherein each of the plurality of reporters is configured to release a detection moiety when cleaved by the programmable nuclease following binding of the guide nucleic acid to the target nucleic acid, and
[0838] wherein release of the detection moiety is indicative of a presence or absence of the target nucleic acid in the sample.

[0839] Embodiment 8. A device for detecting a target nucleic acid, comprising:
[0840] (a) a sample interface configured to receive a sample comprising the target nucleic acid;
[0841] (b) a first reaction chamber in fluid communication with the sample interface, wherein the first reaction chamber comprises a plurality of reporters; and
[0842] (c) a second reaction chamber in fluid communication with the first reaction chamber, wherein the second reaction chamber comprises an enzyme substrate,
[0843] wherein each reporter of the plurality of reporters (i) is immobilized to a surface of the reaction chamber via a tether, (ii) comprised of a programmable nuclease-enzyme fusion protein complexed with a guide nucleic acid, the guide nucleic acid being configured to bind to the target nucleic acid, and (iii) configured to release the programmable nuclease-enzyme fusion protein following cleavage of the tether by the programmable nuclease-enzyme fusion protein bound to the target nucleic acid, and
[0844] wherein release of the programmable nuclease-enzyme fusion protein is indicative of a presence or absence of the target nucleic acid in the sample.

[0845] Embodiment 9. The device of Embodiment 8, wherein the programmable nuclease-enzyme fusion protein comprises Cas12-HRP.

[0846] Embodiment 10. The device of Embodiment 9, wherein the tether of each reporter of the plurality of reporters comprises ssDNA.

[0847] Embodiment 11. The device of Embodiment 9, wherein the tether of each reporter of the plurality of reporters comprises RNA.

[0848] Embodiment 12. The device of Embodiment 11, wherein the tether of each reporter of the plurality of reporters further comprises DNA.

[0849] Embodiment 13. The device of Embodiment 8, wherein the programmable nuclease-enzyme fusion protein comprises Cas12-HRP.

[0850] Embodiment 14. The device of Embodiment 13, wherein the tether of each reporter of the plurality of reporters comprises RNA.

[0851] Embodiment 15. The device of any one of Embodiments 8-14, wherein the enzyme substrate is HRP substrate.

[0852] Embodiment 16. The device of Embodiment 8, wherein the surface is configured to immobilize a nucleic acid.

[0853] Embodiment 17. The device of Embodiment 8, wherein the surface comprises streptavidin, biotin, an amine group, a carboxyl group, an epoxy group, an NHS group, a malemide group, or a thiol group.

[0854] Embodiment 18. The device of Embodiment 8, wherein the surface is a hydrogel surface.

[0855] Embodiment 19. The device of Embodiment 18, wherein the surface comprises an acrydite modification.

[0856] Embodiment 20. A device for detecting a target nucleic acid, comprising:
[0857] (a) a sample interface configured to receive a sample comprising the target nucleic acid;
[0858] (b) a first reaction chamber in fluid communication with the sample interface, wherein the first reaction chamber comprises a plurality of reporters; and
[0859] (c) a second reaction chamber in fluid communication with the first reaction chamber, wherein the second reaction chamber comprises an enzyme substrate, and
[0860] wherein each reporter of the plurality of reporters comprises a programmable nuclease-split enzyme fusion protein complexed with a guide nucleic acid, the guide nucleic acid being configured to bind to the target nucleic acid, and
[0861] wherein release of the programmable nuclease-split enzyme fusion protein is indicative of a presence or absence of the target nucleic acid in the sample.

[0862] Embodiment 21. The device of Embodiment 20, wherein the programmable nuclease-split enzyme fusion protein comprises HRP-L.

[0863] Embodiment 22. The device of Embodiment 21, further comprising a programmable nuclease-split enzyme fusion protein comprising HRP-S.

[0864] Embodiment 23. The device of Embodiment 22, wherein the device is configured to produce a signal upon binding of the programmable nuclease-split enzyme fusion protein comprising HRP-L and binding of the programmable nuclease-split enzyme fusion protein comprising HRP-S to the target nucleic acid.

[0865] Embodiment 24. A device for detecting a target nucleic acid, comprising:
[0866] (a) a sample interface configured to receive a sample comprising the target nucleic acid;
[0867] (b) a first reaction chamber in fluid communication with the sample interface, wherein the first reaction chamber comprises a plurality of reporters, each reporter of the plurality comprising two or more enzymes; and
[0868] (c) a surface of the first reaction chamber, wherein each reporter of the plurality of reporters is immobilized to the surface of the first reaction chamber via a tether, and
[0869] (d) a second reaction chamber in fluid communication with the first reaction chamber, wherein the second reaction chamber comprises an enzyme substrate, and
[0870] wherein cleaving the tether by a programmable nuclease complexed with a guide nucleic acid, the guide nucleic acid being configured to bind to the target nucleic acid, may release the two or more enzymes into solution, and
[0871] wherein each enzyme of the two or more enzymes may be contacted with the enzyme substrate in the second reaction chamber to create a detectable and amplified signal indicative of a presence or absence of the target nucleic acid in the sample.

[0872] Embodiment 25. The device of Embodiment 24, wherein each enzyme of the two or more enzymes comprises HRP.

[0873] Embodiment 26. The device of Embodiment 24, wherein the reporter comprises a poly-HRP comprising a streptavidin comprising the two or more enzymes.

[0874] Embodiment 27. The device of Embodiment 24, wherein the tether contacts the surface via a functionality optionally comprising a biotin, an acrydite, or an amine.

[0875] Embodiment 28. The device of Embodiment 24, wherein the surface of the first reaction chamber is functionalized with a hydrogel, carboxyl group, or N-Hydroxysuccinimide (NHS).

[0876] Embodiment 29. The device of Embodiment 24, wherein the tether comprises a segment of cleavable DNA, cleavable RNA, or a combination thereof.

[0877] Embodiment 30. The device of Embodiment 24 or 25, wherein the enzyme substrate comprises 3,3′,5,5′-tetramethylbenzidine (TMB).

[0878] Embodiment 31. The device of the Embodiment 24, wherein the surface of the first reaction chamber comprises the inner wall of the first reaction chamber.

[0879] Embodiment 32. The device of Embodiment 24, wherein the surface of the first reaction chamber comprises a surface of a bead, wherein the bead is contained within the first reaction chamber.

[0880] Embodiment 33. The device of Embodiment 32, wherein the bead is a magnetic bead.

[0881] Embodiment 34. A composition comprising a plurality of reporters, wherein (a) each reporter of the plurality of reporters comprises one or more enzymes conjugated to a linker; (b) the linker comprises one or more nucleic acid sections; and (c) the linker (i) comprises a functionality for immobilization to a support, or (ii) is conjugated to the support.

[0882] Embodiment 35. The composition of Embodiment 34, wherein the one or more enzymes is a single enzyme.

[0883] Embodiment 36. The composition of Embodiment 35, wherein the enzyme is a horseradish peroxidase (HRP).

[0884] Embodiment 37. The composition of Embodiment 34, wherein the one or more enzymes comprises a poly-HRP comprising a plurality of HRP enzymes.

[0885] Embodiment 38. The composition of Embodiment 37, wherein the plurality of HRP enzymes of the poly-HRP are complexed with streptavidin, and the linker comprises a biotin for conjugation with the poly-HRP.

[0886] Embodiment 39. The composition of any one of Embodiments 34-38, wherein the one or more nucleic acid sections comprise one or more sections of DNA, one or more sections of RNA, or a combination thereof.

[0887] Embodiment 40. The composition of Embodiment 39, wherein the one or more nucleic acid sections consist of DNA.

[0888] Embodiment 41. The composition of Embodiment 39, wherein the one or more nucleic acid sections consist of RNA.

[0889] Embodiment 42. The composition of Embodiment 39, wherein the one or more nucleic acid sections comprise one or more sections of DNA and one or more sections of RNA.

[0890] Embodiment 43. The composition of any one of Embodiments 39-42, wherein the one or more nucleic acid sections are single-stranded.

[0891] Embodiment 44. The composition of any one of Embodiments 39-43, wherein the one or more nucleic acid sections have a combined length of at least 20, 30, 40, or 50 nucleotides.

[0892] Embodiment 45. The composition of any one of Embodiments 39-43, wherein at least one of the one or more nucleic acid sections is a substrate for cleavage by a programmable nuclease.

[0893] Embodiment 46. The composition of Embodiment 39, wherein the linker comprises (a) a first portion comprising a non-naturally occurring guide nucleic acid, and (b) a second portion comprising a nucleic acid section that is a substrate for cleavage by a programmable nuclease; and further wherein the one or more enzymes are conjugated to the linker via the second portion.

[0894] Embodiment 47. The composition of Embodiment 46, wherein the one or more enzymes comprise HRP.

[0895] Embodiment 48. The composition of any one of Embodiments 34-47, wherein the linker further comprises one or more hydrocarbon chains.

[0896] Embodiment 49. The composition of Embodiment 48, wherein the one or more hydrocarbon chains comprises a hydrocarbon chain between the one or more nucleic acid sections and the support.

[0897] Embodiment 50. The composition of Embodiment 48 or 49, wherein the one or more hydrocarbon chains comprises a hydrocarbon chain between the one or more nucleic acid sections and the one or more enzymes.

[0898] Embodiment 51. The composition of any one of Embodiments 34-50, wherein the support is a bead, a hydrogel, or the surface of a container.

[0899] Embodiment 52. The composition of any one of Embodiments 34-51, wherein the linker comprises the functionality for immobilization to the support.

[0900] Embodiment 53. The composition of any one of Embodiments 34-51, wherein the linker is conjugated to the support.

[0901] Embodiment 54. The composition of any one of Embodiments 34-53, further comprising a programmable nuclease.

[0902] Embodiment 55. A system comprising a reaction chamber, wherein the reaction chamber comprises the composition of any one of Embodiments 34-54.

[0903] Embodiment 56. A method for detecting a target nucleic acid in a sample, the method comprising
[0904] (a) contacting the sample with the composition of Embodiment 54 to produce a reaction fluid, wherein (i) the linker is conjugated to the support, (ii) the composition further comprises a guide nucleic acid configured to bind to the target nucleic acid, and (iii) the programmable nuclease cleaves the linker in response to formation of a complex comprising the programmable nuclease, the guide nucleic acid, and the target nucleic acid;
[0905] (b) separating the reaction fluid from the support;
[0906] (c) contacting the separated reaction fluid with a substrate of the one or more enzymes, wherein presence of the one or more enzymes in the fluid produces a detectable signal from the enzyme substrate; and
[0907] (d) detecting the detectable signal.

[0908] Embodiment 57. A method of detecting a target nucleic acid in a sample, the method comprising:
[0909] (a) contacting the sample with the composition of Embodiment 52 to produce a reaction fluid, wherein (i) the composition further comprises a programmable nuclease and a guide nucleic acid, (ii) the guide nucleic acid is configured to bind to the target nucleic acid, and (iii) the programmable nuclease cleaves the linker in response to formation of a complex comprising the programmable nuclease, the guide nucleic acid, and the target nucleic acid;
[0910] (b) contacting the reaction fluid with a plurality of beads, wherein each bead reacts with a plurality of the functionalities, thereby immobilizing the functionalities to the beads;
[0911] (c) separating the reaction fluid from the beads;
[0912] (d) contacting the separated reaction fluid with a substrate of the one or more enzymes, wherein presence of the one or more enzymes in the fluid produces a detectable signal from the enzyme substrate; and
[0913] (e) detecting the detectable signal.

[0914] Embodiment 58. The method of Embodiment 56 or 57, further comprising concentrating the one or more enzymes prior to contacting the one or more enzymes with the substrate, wherein the concentrating comprises separating the one or more enzymes from at least a portion of the separated reaction fluid.

[0915] Embodiment 59. The method of Embodiment 58, wherein concentrating comprises capture of the enzyme on a support.

[0916] Embodiment 60. The method of Embodiment 59, wherein contacting the separated reaction fluid with the substrate of the one or more enzymes comprises contacting the enzyme on the support with the substrate 2, 3, 4, 5, or more times.

[0917] Embodiment 61. A composition for detecting a target nucleic acid, the composition comprising a programmable nuclease, a guide nucleic acid, a first reporter, an enzyme, and a second reporter, wherein:
[0918] (a) the guide nucleic acid is configured to bind to the target nucleic acid;
[0919] (b) the programmable nuclease is effective to cleave the first reporter in response to formation of a complex comprising the programmable nuclease, the guide nucleic acid, and the target nucleic acid;
[0920] (c) the cleavage of the first reporter is effective to separate a first nucleic acid section from a second nucleic acid section thereof;
[0921] (d) the first nucleic acid section is effective to activate the enzyme; and
[0922] (e) the activated enzyme is effective to cleave the second reporter to produce a detectable product comprising a detection moiety.

[0923] Embodiment 62. The composition of Embodiment 61, wherein the enzyme is an endonuclease and the second reporter comprises a polynucleotide substrate of the enzyme.

[0924] Embodiment 63. The composition of Embodiment 62, wherein the endonuclease is a NucC endonuclease.

[0925] Embodiment 64. The composition of Embodiment 63, wherein the first nucleic acid section comprises adenosine residues.

[0926] Embodiment 65. The composition of Embodiment 64, wherein the adenosine residues comprise cyclic adenylate (cA3).

[0927] Embodiment 66. The composition of any one of Embodiments 61-65, wherein the second nucleic acid section comprises RNA residues, optionally wherein the RNA residues comprise a plurality of uracil residues.

[0928] Embodiment 67. The composition of any one of Embodiments 61-65, wherein the second nucleic acid section comprises DNA residues, optionally wherein the DNA residues comprise a plurality of thymine residues.

[0929] Embodiment 68. The composition of any one of Embodiments 61-67, wherein (a) the second reporter comprises a fluorescent label and a quencher, and (b) cleavage of the second reporter by the activated enzyme is effective to separate the fluorescent label from the quencher.

[0930] Embodiment 69. A method of detecting a target nucleic acid in a sample, the method comprising:
[0931] (a) contacting the sample with the composition of any one of Embodiments 61-68;
[0932] (b) cleaving the first reporter with the programmable nuclease in response to formation of the complex comprising the programmable nuclease, the guide nucleic acid, and the target nucleic acid, thereby releasing the first nucleic acid section;
[0933] (c) activating the enzyme with the first nucleic acid section;
[0934] (d) cleaving the second reporter with the activated enzyme, thereby producing the detectable product comprising the detection moiety; and
[0935] (e) detecting the detection moiety, thereby detecting the presence of the target nucleic acid in the sample.

[0936] Embodiment 70. The method of Embodiment 69, wherein (a) the second reporter comprises a polynucleotide substrate of the enzyme, and (b) the enzyme is a NucC.

[0937] Embodiment 71. The method of Embodiment 70, wherein step (d) is performed at a temperature of at least 40° C.

[0938] Embodiment 72. A composition for detecting a target nucleic acid in a reaction chamber, the composition comprising a programmable nuclease, a guide nucleic acid, a forward primer, a reverse primer, a polymerase, a nicking endonuclease, and a reporter, wherein:
[0939] (a) the guide nucleic acid is configured to bind to the target nucleic acid;
[0940] (b) the forward primer comprises (i) a 5′ portion comprising a first hairpin, and (ii) a 3′ portion that is configured to bind the target nucleic acid at a first overlapping region with respect to the guide nucleic acid;
[0941] (c) the reverse primer comprises (i) a 5′ portion comprising a second hairpin, and (ii) a 3′ portion that is configured to bind a complement of the target nucleic acid at a second overlapping region with respect to the guide nucleic acid;
[0942] (d) the first and second hairpins are cleavage substrates for the nicking endonuclease;
[0943] (e) the programmable nuclease is effective to cleave the reporter in response to formation of a complex comprising the programmable nuclease, the guide nucleic acid, and (i) the target nucleic acid or (ii) an amplicon of the target nucleic acid; and
[0944] (f) the cleavage of the reporter is effective to produce a detectable product comprising a detection moiety.

[0945] Embodiment 73. The composition of Embodiment 72, wherein (a) the sequence of the target nucleic acid to which the 3′ portion of the first primer is configured to bind defines a first sequence of the target nucleic acid; (b) the sequence of the 3′ portion of the reverse primer defines a second sequence of the target nucleic acid; and (c) the first sequence and second sequence are separated by about 5 to about 10 nucleotides along the target nucleic acid.

[0946] Embodiment 74. The composition of Embodiment 72 or 73, wherein the 3′ portions of the forward primer and reverse primer are about 16 to about 20 nucleotides in length.

[0947] Embodiment 75. The composition of any one of Embodiments 72-74, wherein overlap between the 3′ portion of the reverse primer and the sequence to which the guide nucleic acid is configured to bind overlap by 1 to 5 nucleotides, 2 to 5 nucleotides, or 3 nucleotides.

[0948] Embodiment 76. The composition of any one of Embodiments 72-75, wherein the first hairpin and/or the second hairpin are 10 to 20 nucleotides in length, 16 to 20 nucleotides in length, or 16 nucleotides in length.

[0949] Embodiment 77. The composition of any one of Embodiments 72-76, wherein the programmable nuclease is a Cas protein, optionally wherein the Cas protein is a Cas12 protein or a Cas14 protein.

[0950] Embodiment 78. A method of detecting a target nucleic acid in a sample, the method comprising:
[0951] (a) contacting the sample with the composition of any one of Embodiments 72-77;
[0952] (b) performing nicking enzyme amplification reaction (NEAR) reaction to amplify the target nucleic acid;
[0953] (c) forming a complex comprising the programmable nuclease, the guide nucleic acid, and (i) the target nucleic acid, or (ii) an amplicon of the target nucleic acid;
[0954] (d) cleaving the reporter with the programmable nuclease activated by formation of the complex, thereby producing the detectable cleavage product; and
[0955] (e) detecting the detection moiety, thereby detecting the presence of the target nucleic acid in the sample.

[0956] Embodiment 79. The method of Embodiment 78, wherein steps (b) through (d) are performed at about the same temperature.

### EXAMPLES

[0957] The following examples are given for the purpose of illustrating various embodiments of the invention and are not meant to limit the present invention in any fashion. The present examples, along with the methods described herein are presently representative of preferred embodiments, are exemplary, and are not intended as limitations on the scope of the invention. Changes therein and other uses which are encompassed within the spirit of the invention as defined by the scope of the claims will occur to those skilled in the art.

### Example 1: Electrochemical Detection of the HERC2 Gene Using the DETECTR Reaction

[0958] DETECTR has previously been demonstrated to be a powerful technology for detection of pathogens such as SARS-CoV-2 (Broughton et al., 2020). Electrochemical detection has been demonstrated to show a lower limit of detection than fluorescence-based assays by roughly two orders of magnitude (Lou et al., 2015). In this example, an electrochemical probe is incorporated into the DETECTR assay.

[0959] The following electrochemical probe: 5′-2XXTTATTXX-3′; Where 2=5′ 6-FAM; X=ferrocene dT and 3=3′ Biotin TEG was used. Additionally, both cyclic voltammetry and square wave voltammetry with the probe, using a DropSens μSTAT. ECL instrument and DropSens screen-printed carbon electrodes were used. A difference in signal between the initial and final timepoints of the DETECTR reaction was observed. A detection of 50 fM. HERC2 target, which is much lower than has been observed with the fluorescence assay was achieved. FIG. 13: presents an oxidation curve for HERC2 DETECTR reaction with electrochemical reporters. Error bars represent standard deviation of two measurements of the same solution, using three traces from each measurement. A 40 nA difference in signal was observed indicating presence of 50 fM of HERC2 target. FIG. 14: presents a reduction curve for HERC2 DETECTR reaction with electrochemical reporters. Error bars represent standard deviation of two measurements of the same solution, using three traces from each measurement. A 30 nA difference in signal indicates the presence of 50 nM of HERC2 after 33 min of reaction. FIG. 15: presents a resultant cyclic voltammogram taken before and after HERC2 DETECTR reaction using 24 μM electrochemical reporter. Each trace is the average of three scans of the same solution and error bars represent standard deviations and the discernable difference between the two voltammograms indicates the presence of 24 μM of reporter.

### Example 2: SARS-CoV-2 Electrochemical DETECTR Reaction

[0960] The following electrochemical probe: 5′-2XXTTATTXX-3′; where 2=5′ 6-FAM; X=ferrocene dT; and 3=3′ Biotin TEG was used with a DNA sequence, part of the genome of SARS-CoV-2. Square wave voltammetry measurements were performed using a DropSens μSTAT ECL instrument and DropSens screen-printed carbon electrodes. A difference in signal between the initial and final timepoints of the DETECTR reaction, using 500 fM of target, was detected. FIG. 16 presents an oxidation curve for SARS-CoV-2 DETECTR reaction with electrochemical reporters. Error bars represent standard deviation of three traces from each measurement. The detailed experimental conditions are as follows. A DETECTR mix was prepared according to FIG. 18. Diluted stock reporter 1/10 (1 μL reporter plus 9 μL nuclease-free water) was used to make 240 μM stock. After 30 minute incubation of DETECTR master mix at 37° C. and adding reporter, the reaction mixture was split into two aliquots of 152 μL of master mix plus 8 μL of target (either 1× TE or 10 pM stock concentration gene fragment). The final target concentration was 500 fM. A 55 μL aliquot for measurement was removed at t=0 and then incubated the rest on a heat block at 37° C. for 20 minutes prior to electrochemical measurement. Square wave voltammetry with parameters according to FIG. 19 were used. One 50 μL drop of solution for each measurement was used. Prior to use, each electrode was rinsed with 1 mL of 1× TE and dried with compressed air.

[0961] Data Analysis was carried out as follows. The first 2 scans were discarded because they typically have anomalous signals from debris on the electrode that is cleared by voltage application. The remaining 3 scans are averaged for each sample, and the standard deviation and coefficient of variance is calculated. The mean current traces were then imported into PeakFit software for a baseline correction. The corrected traces were then exported and the original CV values were used to calculate standard deviations for the error. It should be noted that the aliquot of reporter used had experienced multiple freeze-thaw cycles. The data from the measurements with the original parameter set were noisy and were not fully analyzed. The location of this peak was different from previous experiments, where a peak was observed around 0.15 V. It is worth noting that the aliquot of reporter had experienced multiple freeze thaw cycles, so it may have degraded. As a control, LAMP buffer to determine the relative signal was also run. The LAMP buffer was already activated with magnesium in a previous experiment, then refrozen). The LAMP buffer was run neat, without any dilution. The signal from the LAMP buffer was much higher than the signal from the DETECTR reactions, as is visible in FIG. 17. It was also found that the signal from the negative control at t=0 was higher than the signal from the other DETECTR reactions. However, this measurement was the second one on that sample and electrode, after a first measurement with the original parameters. In conclusion, SARS-CoV-2 electrochemical DETECTR enabled detectable results for the SARS-CoV-2 virus.

### Example 3: Evaluating Function of Biotin Modified gRNAs for Cas13

[0962] The purpose of this experiment was to evaluate biotinylated gRNA functionality with Cas13a both in solution and immobilized on a surface. In this experiment three replicate runs of a biotin-modified gRNA (mod023) and three replicate runs of a non-biotin modified gRNA (R0003) were carried out. Three replicate “no target control,” or NTC runs were carried out for both the mod023 reporter and R0003 control. The procedure was carried out as follows:
[0963] (1) gRNAs were diluted to 20 μM.
[0964] (2) Cas12 variant (SEQ ID NO: 17) complexing reactions using gRNAs were prepared. The testing and control complexes were diluted to 100 μM final concentrations. Complexing reactions were carried out in two conditions with 3 replicates each resulting in 6 reactions per gRNA. Please see FIG. 16 for complexing mix details.
[0965] (3) Sample was incubated for 30 min at 37 C.
[0966] (4) Reporter substrate was added.
[0967] (5) Reaction was kept on ice until the next step.
[0968] (6) 13 μL of 1× MBuffer 1 was added in wells on 384-well plates.
[0969] (7) 5 μL of complexing reaction was added.
[0970] (8) In a post-amp hood, 2 μL of 1 nM target (respective) was transferred to and kept in a 384 well plate on ice.
[0971] (9) Sealed plate with optically clear seal.
[0972] (10) Spun down for 30 sec at 2000 rcf.
[0973] (11) Read on plate reader with extended gain settings for 30 min at 37 C.

[0974] FIGS. 32A and 32B show results, in solution, for mod023, the biotin modified reporter, and R003 the non-biotin-modified reporter, respectively. It was shown that the biotin-modified gRNA had similar performance to the non-biotin-modified gRNA in solution. FIG. 32C shows results for gRNA that was modified with biotin and immobilized to the surface. FIG. 32D shows results for gRNA that was not modified with biotin but was deposited on the surface in the same manner as C. FIG. 32E, similar to FIGS. 32A and 32B, shows results for gRNA that was unmodified and in solution. Together these results showed that with biotin modification and surface immobilization functionality was maintained and DETECTR assay performance was not adversely affected.

### Example 4: Optimizing Reporter Incubation Time on Streptavidin Slides

[0975] The objective of this experiment was to verify if a 30 min incubation time was sufficient to produce a strong signal assay signal. Two concentrations were run. The procedure used is as follows:
[0976] 1. Dilutions of REP072 rep 106 at 1 μM and 5 μM in 1× Wash Buffer were prepared. 1× Wash Buffer is composed of 25 mM Tris, 150 mM NaCl; pH 7.2; 0.1% BSA, and 0.05% Tween®-20 Detergent.
[0977] 2. The wells of a fresh streptavidin slide were marked as shown in FIG. 33 and FIGS. 34A and 34B using a hydrophobic pen.
[0978] 3. Three uL of each dilution were spotted on the streptavidin coated slide (in triplicate).
[0979] 4. The slide was incubated for 30 min at room temperature and covered from light.
[0980] 5. Three uL of the dilution were removed from each spot.
[0981] 6. Five uL of 1× wash buffer was added to each spot and mixed up and down 3 times. This wash step was repeated three times.
[0982] 7. 50 μL of 1× wash buffer was added and incubated for 5 min.
[0983] 8. The slide was then flicked over a kim wipe to remove all the solution then dabbed gently on all four sides against a kim wipe to clean up the edges.
[0984] 9. The slides were then imaged on GelDoc (SYBR Blue setting, autoexposure with adjusted gain settings).

[0985] FIG. 33 shows results for the test reporter, Rep072, and the negative control, Rep106. The replicates of Rep072 at 5 μM show the strongest signal and the three replicates of Rep072 at 1 μM concentration show the next strongest signal. The negative control reporter, rep 106 shows the same low signal (on none at all) for both 5 μM and 1 μM concentrations. This result shows specific binding of a FAM-bioinylated reporter with a 30 minute incubation time at both 5 μM and 1 μM concentrations. FIGS. 34A-34B show similar results with reporters at 5 mM in FIG. 34A and 2.5 mM in FIG. 34B. The top row of FIGS. 34A and 34B shows spots exhibiting bright fluorescence and the bottom row of FIGS. 34A and 34B show spots exhibiting similarly low fluorescence.

### Example 5: Quencher-Based Reporter Testing for Immobilization

[0986] Fluorescent quencher-based reporters were tested in an immobilized DETECTR assay. Streptavidin functionalized plates and biotin labeled reporters were used. FIG. 36 shows sequence and other details for reporters used in this experiment. The following procedure was used:
[0987] 1. Stocks of the reporters rep072, rep104, rep105, rep117 and rep118 were prepared for binding to the reader plate. Reporter binding details can be seen in FIG. 37A.
[0988] 2. Complexing reactions were then prepared using the mod018 sequence that is 5′ modified with biotin TEG. See FIG. 36 for more details on sequence mod018. Complexing mix details can be seen in FIG. 37B.
[0989] 3. Complexing reactions were incubated for 30 min at 37 C.
[0990] 4. Grid of dilutions of RNP and reporter were prepared with (50:50 ratio) with enough material for 2 reactions each.
[0991] 5. Wells of a 96-well streptavidin coated plate were pre-rinsed with 100 μL of 1× MBuffer1, twice.
[0992] 6. 25 μL of complex and 25 μL reporter mix were then added.
[0993] 7. Sealed plate with foil seal.
[0994] 8. Binding was then carried out at 25 C for 30 minutes with intermittent shaking (1000 rpm 15 sec every 2 min on Thermomixer).
[0995] 9. Plates were then spun down briefly.
[0996] 10. Supernatant was removed.
[0997] 11. Washed once with 100 μL 1× MBuffer-1. 1× MBuffer-1 is composed of 20 mM Imidazole 7.5, 25 mM KCl, 5 mM MgCl2, 10 μg/mL BSA, 0.01% Igepal Ca-630, and 5% Glycerol.
[0998] 12. Washed once with 100 μL 1× MBuffer-3. 1× MBuffer-3 is composed of 20 mM HEPES pH 7.5, 2 mM KOAc, 5 mM MgOAc, 1% Glycerol, and 0.00016% Triton-X 100.
[0999] 13. Added 50 μl of 1× MBuffer3 to each well.
[1000] 14. Added 5 μL of target/no-target in 1× MBuffer3 a. target volume=5 μL per reaction (GF577 PCR product 1:10).
[1001] 15. Sealed plate with foil seal.
[1002] 16. Incubated at 37 C for 90 minutes with intermittent shaking in plate reader measuring FAM intensity.
[1003] 17. Spun down briefly.
[1004] 18. Transferred 20 μL of supernatant to wells of 384-well plate and measured FAM fluorescent intensity (single-read).

[1005] Results are illustrated in FIGS. 27A-27E. As predicted the positive control shows a positive slope indicating increased binding over the course of the reaction. This is due to the release of FAM dye into solution upon binding and transcleavage as seen in FIG. 27B. In rep104 the cleavage point is between the FAM and the biotin, while the biotin in all reporters is the attachment point to the streptavidin surface. FIG. 27C plots the control, target binding kinetic plot for rep 105. Rep 105 is composed of biotin-FAM-T16-FQ. In this case the streptavidin coated surface emits fluorescence because the region between the FAM dye and the quencher is cleaved upon binding and the quencher is released. FIG. 27D plots the control, target binding kinetic plot for rep 117. Rep117 is composed of biotin-FAM-T20-FQ. In this embodiment, where the reporter is cleaved between the FAM dye and the quencher, thus allowing for release of the quencher in the solution upon binding and transcleavage. This in turn, allows the surface emits fluorescence. FIG. 27E plots the control, target binding kinetic plot for rep118. Rep118 is composed of FAM-T20-biotin-FQ. In this embodiment, the solution emits fluorescence because upon binding the nucleic acid region between the biotin and the FAM is transcleaved, thus releasing the FAM into solution.

### Example 6: Immobilization Optimization-Complex Formation Step

[1006] The objective of this experiment was to determine whether binding both the gRNA and reporter to a plate allows the DETECTR assay to be as effective as binding the CAS protein-gRNA complex and reporter. This removes the need to functionalize the surface with the pre-complex of gRNA and CAS protein, allowing for an easier manufacturing process. Additionally, greater specificity can be achieved by allowing for more stringent washes. The following procedure was used.
[1007] 1. The experiment was designed as shown in FIG. 38A.
[1008] 2. A stock solution of reporter rep117 was bound to the plate according to the conditions presented in FIG. 38B.
[1009] 3. Complexing reactions for mod018 (5′ biotin-TEG R1763 SARS-CoV-2 N-gene) and R1763 CDC-N2-Wuhan were then prepared according to the conditions presented in FIG. 39A.
[1010] 4. Two sets of full complexing mix were made for each and two mixes without Cas12 variant (SEQ ID NO: 17) according to FIG. 39B.
[1011] 5. Incubated complexing reactions for 30 min at 37C
[1012] 6. Pre-rinsed wells of 96-well streptavidin coated plate with 50 μL of 1× MBuffer1, twice
[1013] 7. Added 25 μL reporter to each well.
[1014] 8. Added 25 μL of complex to A1-D2, 25 μL 1× MB1 to A3-D4, and 25 μL CRNA mix A5-D6.
[1015] 9. Sealed plate with foil seal.
[1016] 10. Ran binding reaction at 25 C for 30 minutes with intermittent shaking, 1000 rpm 15 sec every 2 min on Thermomixer
[1017] 11. Spun streptavidin plate down briefly.
[1018] 12. Removed supernatant.
[1019] 13. Washed twice with 100 μL 1× MBuffer-1.
[1020] 14. Washed once with 100 μL 1× MBuffer-3.
[1021] 15. Added 50 μl of 1× MBuffer3 to wells A1-D2.
[1022] 16. Added 25 μL 1×MB3 and 25 μL of complex to “in-solution” wells A3-D4.
[1023] 17. Added 47.5 μL 1×MB3 and 2.5 μL Cas12 variant (SEQ ID NO: 17) (50 μL MM) to each “prot after” well A5-D6.
[1024] 18. Added 5 μL of 1:10 diluted purified LAMP product to (+) target wells.
[1025] 19. Sealed plate with optically clear seal.
[1026] 20. Read on plate reader-FAM, 37 C, 90 min.

[1027] The results of this experiment are shown in FIGS. 29A-29F show that is it possible to add CAS protein with the target and still achieve complexing and signal. FIGS. 29A-29C illustrate results for a first replicate of tests. FIGS. 29D-29F illustrate results for a second replicate of tests. FIGS. 29A and 29D show results where both a biotinylated reporter and a complex of biotinylated RNA and CAS protein were immobilized. Here activity buffer and target were then added. FIGS. 29B and 29E illustrate results where the biotinylated reporter is immobilized and all other reaction components including gRNA and CAS protein are introduced in solution. FIGS. 29C and 29F illustrate results where the biotinylated reporter and biotinylated gRNA are immobilized and then buffer, CAS protein and target are added. In these results it is observed that complexation of CAS protein and gRNA and a reporter signal upon binding can be detected when only gRNA and reporter are immobilized as shown in FIG. 29F.

### Example 7: Demonstration of Immobilized Target Discrimination

[1028] The purpose of this experiment was to demonstrate target discrimination for immobilized reporters for the DETECTR reaction. The experiment design used in this experiment is shown in FIG. 40A. The following procedure was used.
[1029] 1. Experiment planned as shown in FIG. 40A. The experiment included 3 gRNAs including mod018, mod025 and mod024. Two targets and two controls were used. The two targets were N-gene and RNaseP. The two controls were: (1) no target with all other reaction components and (2) water.
[1030] 2. Stock solution of reporter rep117, later bound to plate, was prepared as shown in FIG. 40B.
[1031] 3. Complexing reactions were prepared for the three gRNAs: mod018, mod024 and mod025 with reporters:
[1032] (1) biotin-TEG R1763 SARS-CoV-2 N-gene,
[1033] (2) 5′ biotin-TEG R777 Mammuthus,
[1034] (3) 5′ biotin-TEG R1965 RNase P, respectively. The reaction conditions are shown FIG. 41A.
[1035] 4. Pre-rinsed wells of 96-well streptavidin coated plate with 50 μL of 1× MBuffer1, twice.
[1036] 5. Added 25 μL reporter to each well.
[1037] 6. Added 25 μL complexing mix to wells.
[1038] 7. Sealed plate with foil seal.
[1039] 8. Ran binding reaction at 25 C for 30 minutes with intermittent shaking (1000 rpm 15 sec every 2 min on Thermomixer).
[1040] 9. Ran FASTR protocol as follows:
[1041] a. Primers used:
   [1042] I. SARS-CoV-2: M2062 CDC N2-FWD/M2063 CDC N2-REV.
   [1043] II. RNase P: POP7 8F/6R. Please see FIG. 41B for reaction conditions.
   [1044] II. a. Pipette 4 μL of master mix into wells of MBS 96-well plate.
[1045] b. Added 1 uL twist RNA dilution.
[1046] c. 1000 copies/uL: 7.8 μL of 6400c/uL in 42.2 μL H2O.
[1047] d. Sealed plate with foil seal at 165 C for 1.5 seconds.
[1048] e. Ran the following PCR protocol on the MBS NEXTGENPCR thermocycler according to conditions shown in FIG. 42.
[1049] f. Removed plate from thermocycler.
[1050] g. Spun down at 2000 rpm for 30 sec.
[1051] h. Kept on ice until ready to use.
[1052] 10. Spun streptavidin plate down briefly.
[1053] 11. Removed supernatant.
[1054] 12. Washed twice with 100 μL 1× MBuffer-1.
[1055] 13. Washed once with 100 μL 1× MBuffer-3.
[1056] 14. Added 50 μL 1XMB3 15 mM Mg2+.
[1057] 15. Added 4 μL of target from FASTR to target wells.
[1058] 16. Sealed plate with optically clear seal.
[1059] 17. Read on plate reader-FAM, 37 C, 90 min.

[1060] Results are shown FIGS. 31A-31C. FIG. 31A presents results for reporter mod018 showing specificity for the N-gene target. FIG. 31B presents results for reporter mod025 showing specificity for the RNaseP target. FIG. 31C presents results for mod024 showing no signal as predicted since no target was present.

### Example 8: Functional Testing for One-Pot RT-LAMP

[1061] The purpose of this experiment was to test the functionality of a one-pot reaction composed of both RT-LAMP and Cas12 variant enzyme-based DETECTR master mixes using SEQ ID NO: 17. Both master mixes were co-lyophilized together into one master mix. The reactions are functionally incompatible due to optimal reaction temperature differences, so they were evaluated independently. The RT-LAMP master mix shows reaction characteristics like the liquid controls. Results are shown for the RT-LAMP assay in FIG. 99A and the Cas12 variant assay using SEQ ID NO: 17 in FIG. 99B. The results shown in in FIG. 100 demonstrate a ‘one pot’ reaction, composed of RT-LAMP and Cas12 variant DETECTR master mixes using SEQ ID NO: 17, co-lyophilized into one master mix and reconstituted. The results shown in FIG. 100 demonstrate activity based on the reaction curves.

### Example 9: Cas14a1 DETECTR

[1062] The purpose of this experiment was to investigate Cas14a1 which is functional at higher temperatures than RT-LAMP assay requires. In this example the temperatures were run up to 55° C. The results shown in FIG. 101 demonstrate that Cas14a1 was able to be lyophilized and reconstituted with activities comparable to the control.

### Example 10: Functional Testing of a One-Pot Cas12 Variant-Based DETECTR Assay Using SEQ ID NO: 17

[1063] The purpose of this experiment was to investigate the performance of pooled and lyophilized master mixes containing both RT-LAMP and DETECTR reaction reagents together. Further this study showed that the pre-lyophilized mixture is stable for two weeks prior to lyophilization. The master mix of RT-LAMP and Cas12 variant-based DETECTR lyophilized together, was functionally tested separately using SEQ ID NO: 17, since the Cas12 variant (SEQ ID NO: 17) is not compatible with the RT-LAMP amplification conditions. These data show robust RT-LAMP and Cas12 variant-based DETECTR activity using SEQ ID NO: 17, comparable to the master mix that was stored at 4° C. for two weeks prior to lyophilization. Results are shown in FIGS. 102A and 102B.

### Example 11: Smaller Volume Lyophilization Reactions

[1064] Previous to this example, lyophilized sample volume was demonstrated at 250 μL and performed in glass vials. This example provides data for lyophilization of 25 μL samples in 8-well plastic strip tubes. Additionally, the pre-lyophilization (3 weeks at 4° C.) and values are comparable showing stability of the master mix as seen in FIG. 103. Differential scanning calorimetry results of a lyophilized master mix of reaction reagents, including in 15% Trehalose, are shown in FIG. 104. A half-height mid-point of 109.89° C. was observed. These results taken together demonstrate that the master mix of reaction reagents are stable throughout the lyophilization process at smaller volumes.

### Example 12: One-Pot DETECTR on Handheld Microfluidic Device

[1065] In this experiment, the performance of the one-pot DETECTR assay in a handheld microfluidic device was evaluated. Here, one-pot refers to both the RT-LAMP and DETECTR reagents lyophilized as one master mix of reagents. The functions performed on the handheld, microfluidic device included: sample intake; RNA extraction from sample; mixing of the sample with CRISPR reactants; and the transfer of the mixture to a well to heat the mixture to the reaction temperature. In the device, the mixture was heated, and fluorescence was monitored continuously over time. FIG. 106 displays results plotted at 3 different data acquisition settings. The series made of squares shows a setting that did not saturate the detector and therefore displayed the full dynamic range of the signal throughout the life of the assay. From this data it was determined that the DETECTR assay is functional when ran on a miniaturized handheld, microfluidic device.

### Example 13: DETECTR-Based Lateral Flow Assay Strip

[1066] The purpose of this example is to demonstrate a DETECTR™-based multiplexed assay using a lateral flow assay (LFA) strip for parallel readout as illustrated in FIG. 107A-107B. To perform the DETECTR™ assay, a surface (10700) is immobilized with programmable nuclease probes (10707) and reporter probes (10701). In this example, the surface is the bottom of a well, separate from the LFA strip. The reporter probes (10701) contain a surface linker (10702), a cleavable nucleic acid sequence (10703), a label (10704) and binding moiety for the flowing capture probe (10705) of the strip. In this example the binding moiety is biotin. The label and binding moiety are attached to the nucleic acid (10703) by a second linker (10706), where in this example the linker is a dendrimer or trebler molecule. The programmable nuclease probe (10707) contains a surface linker and a programmable nuclease (e.g., Cas enzyme) that in turn contains an sgRNA (10708). The sgRNA contains a repeat unit (or hair pin) and a recognition sequence. The recognition sequence is the compliment for a target nucleic acid of the sample. Anti-biotin labeled gold nanoparticles are located in the sample pad (10711) of the LFA strip (10710) as shown in FIG. 107B. In this example, the first step is to contact the surface (10700) with a sample containing target nucleic acids. Upon binding of a target nucleic acid that is complimentary to the sgRNA (10708) of the immobilized programmable nuclease probe (10707), the reporters (10701) immobilized in near proximity, are cleaved by the programmable nuclease, releasing a cleaved section of the reporter (10709) into solution. The sample solution now containing cleaved reporters corresponding to target nucleic acids that were present in the sample, is then contacted to the sample pad (10711) of the lateral flow assay strip (10710). In this example, the sample pad has flowing capture probes (e.g., anti-biotin labeled gold nanoparticles) disposed thereon. Once the sample solution containing released sections of reporters is contacted with the sample pad, said sample solution then flows across the sample pad (for e.g., by being wicked). The cleaved reporters in the sample solution contact and bind to the anti-biotin gold nanoparticle flowing capture probes upon contact in solution. The complex of reporter and nanoparticle is then carried downstream with the rest of the liquid sample by capillary action through the detection region (10712) of the lateral flow assay strip. In this example, the detection region (10712) may comprise six detection spots (10713), where each detection spot (10713) contains a different capture antibody type that is specific for a reporter's dye (10704). In this example, the dye (10704) is FITC and the stationary capture probe is an anti-FITC antibody functionalized to the detection spot (10713) allowing for the specific detection of the FITC labeled reporter among other reporters that are specific for other target nucleic acids. A control line (10714) is present, functionalized with anti-IgG so that all flowing capture probes, not bound to a FITC labeled reporter fragment, (e.g., detection moiety) are captured and detected. It should be noted that in this example, multiple labels and binding moieties were present via the dendritic linker of the detection moiety (10706) to amplify the signal. In this example, multiple detections spots (10713) are present, allowing for the possibility parallel detection of multiplexed samples, as explained in Example 14.

### Example 14: Multiplexed DETECTR-Based Lateral Flow Assay Strip

[1067] The purpose of this example is to demonstrate a lateral flow assay strip workflow utilizing a multiplex “Hotpot” assay as illustrated in FIG. 108. In this example, a sample (10801) contains target nucleic acid sequences 1 and 2. The sample (10801) is contacted to the surface (10802) of a well where at each of five locations, D1 through D5, there are different sgRNA's immobilized to the surface. For example, each of the 5 different sgRNA's are part of 5 different programmable nuclease probes (e.g., see FIG. 107) immobilized in the five different locations D1 through D5, as depicted in FIG. 108. Additionally, each of the 5 different sgRNA's are designed to specifically bind to different target nucleic acids in the sample, thus allowing for sample multiplexing. In addition to the immobilized programmable nuclease probes containing sgRNAs, each location, D1 through D5, is functionalized with reporter probes having distinct functional groups. The reporter probes are in close enough proximity to be cleaved by the programmable nuclease probes. Therefore, as described in example 13, reporters are cleaved and released into the solution upon binding between a sgRNA and the target nucleic acid that the sgRNA is designed to bind specifically to. In this example, D4 and D5 each contain reporters labeled with two different labels or capture antibody recognition elements. Once the sample has contacted with the wells (D1 to D5), the respective cleaved sections of reporters are released into the sample solution (as described in Example 13). The sample solution with the released reporters are then contacted with a sample pad, wherein in this example, is situated on lateral flow assay. In this example each detection spot contains a different type of capture antibody, where each capture antibody type specifically binds to a particular label of a reporter. For this example, detection spot (10803) contains the capture antibody anti-FITC, whereas well D5 contains 1) the immobilized Cas-complex including the sgRNA specific to a first target nucleic acid sequence, and 2) the immobilized reporter (10806), which is labeled with FITC. Therefore, upon binding of the first target nucleic acid sequence with the corresponding sgRNA, the linkage between the corresponding immobilized reporter (10806) and corresponding nucleic acid (for example see ref. char. 10701 in FIG. 107) is cleaved, thereby releasing the reporter into solution. By contrast, for this example, detection spot (10804) contains the capture antibody anti-DIG, whereas well D4 contains 1) the immobilized Cas complex including the sgRNA specific to a second target nucleic acid sequence, and 2) the immobilized reporter (10805), which is labeled with DIG. Therefore, upon binding of the second target nucleic acid sequence with the corresponding sgRNA, the linkage between the corresponding immobilized reporter (10805) and corresponding nucleic acid (for example see ref. char. 10701 in FIG. 107) is cleaved, thereby releasing the reporter the solution. The solution now containing cleaved reporters (10805 and 10806) is then contacted to the sample pad of the LFA strip along with chase buffer, where the reporters bind with and pick up flowing capture probes (e.g., anti-biotin-AuNPs) that are disposed on the sample pad. The AuNP-reporter conjugates having reporter (10806) labeled with FITC will selectively bind to detection spot (10803) containing the capture antibody anti-FITC, thus indicating the presence of the first target nucleic acid sequence in the sample. The AuNP-reporter conjugates having reporter (10805) labeled with DIG will selectively bind to detection spot (10804) containing the capture antibody anti-DIG, thus indicating the presence of the second target nucleic acid sequence in the sample. In this manner, parallel detection of 2 or more target nucleic acid sequences present in a multiplexed sample is enabled. In some examples, the detection spots are spaced apart from each other in prescribed locations, such that detection of a reporter at a given detection spot will correlate with a specific target nucleic acid.

### Example 15: HRP-Enhanced DETECTR-Based Lateral Flow Assay Strip

[1068] The purpose of this example is to demonstrate horse radish peroxidase (HRP) paper-based detection as illustrated in FIG. 109. Here, “paper-based” refers to a lateral flow assay strip. As in examples 7 and 8, a liquid, blue color sample, containing a target(s) nucleic acid sequence is exposed to a surface upon which CRISPR-Cas/gRNA probes and reporter probes are immobilized. In this example, the reporter probes contain HRP molecules. Upon cleavage of the reporter by the Cas enzyme (e.g., programmable nuclease) following a specific binding event between the target and the guide RNA, the cleaved portion of the reporter is released into the sample solution. In this example, the sample solution having the released sections of reported molecules is then contacted with a lateral flow assay strip comprising a sample pad containing sodium percarbonate, which generates H₂O₂ when hydrated. The rehydration of the sodium percarbonate to form H₂O₂ occurs when the sample is wicked through the sample pad and the lateral flow assay to a detection spot, as described in the previous examples 7 and 8. In this example, the lateral flow assay strip contains the chemical substrates DAB and TMB which activate a color change from blue to red, indicating the presence of HRP, and in turn a “hit” for the target nucleic acid sequence. The chemical catalytic nature of HRP enables signal amplification. Alternatively, the readout can also be accomplished in solution, upon a color change of the sample solution from blue to red.

### Example 16: HRP-Enhanced Multiplexed DETECTR-Based Lateral Flow Assay Strip

[1069] The purpose of this example is to demonstrate an HRP-signal enhanced multiplexed lateral flow assay as illustrated in FIG. 110. The immobilized surface (11000) and detection on the lateral flow assay strip (11010) are carried out as described in the previous examples with the exception that signal enhancement is not carried out by gold nanoparticles scattering light. Instead, the anti-biotin labeled AuNP are supplanted by HRP-anti-biotin DAB/TMB. The HRP is activated by sodium percarbonate present in the LFA strip which is rehydrated by the reaction and or chase buffer. In this manner, HRP allows for strong enough signal so as not to require sample amplification such as PCR. Multiplexed detection is accomplished in the same manner as described in Example 14.

### Example 17: Cas13 Based, HRP-Enhanced DETECTR LFA with Capture Oligo Probe Specificity

[1070] The purpose of this example is to demonstrate multiplexed target nucleic acid detection utilizing Cas13 RNA cleaving specificity over DNA, HRP-signal enhancement, and capture oligo probe specificity as shown in FIG. 111. In this example, the sample (11100) contains different target nucleic acids. The sample (11100) is then contacted to the surface (11101) of the well that is functionalized at five locations, D1-D5, as described in Example 14. The difference here is that the Cas13 enzyme is present in the Cas-complex probe. Cas13 cleaves RNA but not DNA. This enables the use of a reporter (11102) that contains nucleic acid sequences, one composed of DNA and the other composed of RNA. Upon binding of the target nucleic acid to the sgRNA, the RNA of the reporter is cleaved by the Cas13 enzyme and a fragment containing: a portion of the RNA; the complete DNA sequence; and the FITC label is released into solution. This action is repeated in parallel at each spot D1 through D5 for five different target nucleic acids, producing 5 distinct reporter fragments. The solution is then contacted to the sample pad of the LFA strip, where the sample pad contains HRP-anti-FITC. The FITC labeled reporter fragment then binds to the HRP-anti-FITC, forming a complex (11103) and is carried downstream across the detection region, binding specifically to the detection spot containing a capture oligo that has been designed to be the compliment for the oligo in the complex (11103). In this manner, parallel detection of multiplexed samples as described in Example 14 is possible.

### Example 18: HRP-Enhanced DETECTR™-Based Lateral Flow Assay Strip Utilizing Cas14

[1071] The purpose of this example is to demonstrate horse radish peroxidase (HRP) paper-based detection as illustrated in FIG. 109. Here, “paper-based” refers to a lateral flow assay strip. As in examples 13 and 14, a liquid, blue color sample, containing a target(s) nucleic acid sequence is exposed to a surface upon which programmable nuclease probes and reporter probes are immobilized. In this example, the reporter probes contain HRP molecules. Upon cleavage of the reporter by the Cas 14 enzyme following a specific binding event between the target and the guide nucleic acid, the cleaved portion of the reporter is released into the sample solution. In this example, the sample solution is then exposed to a lateral flow assay strip comprising a sample pad containing sodium percarbonate, which generates H₂O₂ when hydrated. The rehydration of the sodium percarbonate to form H₂O₂ occurs when the sample is wicked through the region, as described in the previous examples 13 and 14. Since the substrate contains DAB, TMB, etc . . . the “spot” changes from blue to red, indicating the presence of HRP, and in turn a “hit” for the target nucleic acid sequence. In this manner HRP enables signal amplification. Alternatively, as shown in FIG. 109, the readout can also be accomplished in solution, upon a color change of the sample solution from blue to red.

### Example 19: HRP-T20-Biotin (SEQ ID NO: 1498) DETECTR™-Based Assay

[1072] The purpose of this example was to demonstrate an HRP and DETECTR™-based assay. In this example, reporters were cleaved by a Cas complex, or a DNAse enzyme in solution. The cleaved reporter was reacted to HRP-T20-biotin (SEQ ID NO: 1498). The supernatant solution was then added to a reaction volume that contained TMB and H₂O₂ to generate a color signal. The cleaved reporter-HRP conjugate was then detected by optical density measurement of the solution. Optical density measurements were acquired from the beginning of the reaction. The experiment was performed in two sets comprising 2 runs each, where each set was run 1 week apart. DNase and DETECTR™ were used separately in each run of each set. In the DNase runs, 1 nM of HRP target oligo was used in the filled in circle series. Results are shown in FIG. 112. The significance of this example is that multiple turnovers of both HRP and DETECTR™ enable alternative signal amplification to sample amplification such as PCR.

### Example 20: Guide Pooling for Enhanced Target Detection Signal in DETECTR Assays

[1073] Guide RNAs that were designed to bind to a different region within a single target nucleic acid were pooled as a strategy for enhancing the target detection signal from DETECTR assays. For examples, in this strategy, each DETECTR™ reaction contained a pool of CRISPR-Cas RNP complexes each of which targeted a different region within a single molecule. As discussed in the paragraphs below, this strategy resulted in increased sensitivity to target detection by using increased number of complexes/single target such that the signal is strong enough to detect within a Poisson distribution (sub-one copy/droplet) and provide a quantitative evaluation of target numbers within a sample.

[1074] To test the effect of guide pooling on target detection using the Cas12a nuclease, first, a Cas12a complexing mix was prepared. The R1965 (off-target guide), R1767, R3164, R3178 guides were present in the Cas12a complexing mix in either a pooled-gRNA format (a pool of two or more of the three guides selected from R1767, R3164, or R3178) or in a single-gRNA format (wherein R1767, R3164, R3178 were present individually) and the mix was incubated for 20 minutes at 37° C. A 2-fold dilution series for the template RNA (GF184) was created from a starting dilution concentration (wherein 5.4 μl of GF184 at 0.1 ng/uL was added to 44.6 μl of nuclease-free water). DETECTR master mixes which included the Cas12 complex, Reporter substrate, Fluorescein, Buffer, and diluted template (GF184 or off-target template GF577) were then assembled as shown in Table 7. The DETECTR mixes were then loaded into a Stilla Sapphire chip and placed into the Naica Geode. Crystals were created from thousands of droplets from each sample. No amplification step was performed. The signal from the Sapphire chips was measured in the Red channel. The results of the DETECTR assay showed enhanced Cas12a-based detection of the GF184 target using a pooled-guide format compared to DETECTR Cas12a-based assay using an individual guide format. For example, the DETECTR assays showed an enhanced signal from chamber 5 containing a pool of two guides R1767 and R3178, compared to the signal from chamber 2 or chamber 4 which contained the R1767 and R3178 in individual guide format, respectively, as shown in FIG. 114. Similarly, the DETECTR assays showed an enhanced signal from chamber 9 containing a pool of three guides (R1767, R3164, and R3178), compared to the signal from chamber 5 which contained a pool of two guides (R1767 and R3178) and compared to the signal from chamber 2, chamber 3, or chamber 4 which contained the R1767, R3164, and R3178 in individual guide format, respectively, as shown in FIG. 114.

[1075] Table 7 displays conditions, copies per chamber, number of droplets and copies/droplet per chamber.

| | | Copies/ | # | copies/ |
|---|---|---|---|---|
| Chamber | Condition | Chamber | Droplets | droplet |
| 1 | Off Target | 2.5 × 10⁷ | 29336 | 852 |
| | Guide (1965) | | | |
| 2 | Single R1767 | 2.5 × 10⁷ | 26838 | 931 |
| 3 | Single R3164 | 2.5 × 10⁷ | 29590 | 845 |
| 4 | Single R3178 | 2.5 × 10⁷ | 27769 | 900 |
| 5 | 2x pool | 2.5 × 10⁷ | 27929 | 895 |
| | (R1767, R3178) | | | |
| 6 | 2x pool | 1.25 × 10⁷ | 28787 | 434 |
| | (R1767, R3178) | | | |
| 7 | 2x pool | 6.125 × 10⁶ | 27503 | 223 |
| | (R1767, R3178) | | | |
| 8 | 2x pool | 0 | 28814 | 0 |
| | (R1767, R3178) | | | |
| 9 | 3x Pool | 2.5 × 10⁷ | 27881 | 897 |
| | (R1767, R3164, | | | |
| | R3178) | | | |
| 10 | 3x Pool | 1.25 × 10⁷ | 29523 | 423 |
| | (R1767, R3164, | | | |
| | R3178) | | | |
| 11 | 3x Pool | 6.125 × 10⁶ | 28957 | 211 |
| | (R1767, R3164, | | | |
| | R3178) | | | |
| 12 | 3x Pool | 0 | 29087 | 0 |
| | (R1767, R3164, | | | |
| | R3178) | | | |

[1076] Enhanced sensitivity to target detection with guide-pooling was observed in the case of Cas13a nuclease also. In these assays, a Cas13a complexing mix was prepared wherein the R002 (off-target guide), R4517, R4519, R4530 guides were present in either a pooled-gRNA format (a pool of two or more of the three guides R4517, R4519, and R4530) or single-gRNA format (wherein R4517, R4519, and R4530 were present individually) and the mix was incubated for 20 minutes at 37 C. DETECTR master mixes which included the Cas13a complex, FAM-U5 Reporter substrate, Buffer, and diluted template SC2 RNA (or off-target template 5S-87) was then assembled as shown in Table 8. The DETECTR mixes were then loaded into a Stilla Sapphire chip and placed into the Naica® Geode system. Crystals were generated from the droplets from each of the samples and incubated at 37° C. (no amplification step was performed). The signal from the Sapphire chips was measured in the Cy5 channel. The results of the DETECTR assay showed enhanced Cas13a-based detection of the SC2 target RNA using a pooled-guide format compared to a Cas13a-based detection of the SC2 target RNA using a single-guide format. For example, the DETECTR assays showed an enhanced signal from chamber 8 (saturated—not displayed), containing the template at a concentration of 1×10⁶ copies, and a pool of the three guides R4517, R4519, and R4530, compared to the signal from chamber 2, chamber 4, or chamber 6 which contained the template at a concentration of 1×10⁶ copies, and the guides R4517, R4519, and R4530 in individual guide format, respectively, as shown in FIG. 115. Similarly, the DETECTR assays showed an enhanced signal from chamber 9 which contained the template at a concentration of 1×10⁵ copies and a pool of three guides (R1767, R3164, and R3178), compared to the signal from chamber 2, chamber 6, or chamber 4, which contained the template at a concentration of 1×10⁶ copies, and which contained the R1767, R3164, and R3178 in individual guide format, respectively, as shown in FIG. 115.

[1077] Table 8 displays conditions, copies per chamber, number of droplets per chamber and copies per droplet per chamber.

| | | Copies/ | # | |
|---|---|---|---|---|
| Chamber | Condition | Chamber | Droplets | copies/droplet |
| 1 | Off Target | 1 × 10⁶ | 19960 | 50 |
| | Guide (R002) | | | |
| 2 | Single R4517 | 1 × 10⁶ | 18102 | 55 |
| 3 | Single R4517 | 0 | 19146 | 0 |
| 4 | Single R4519 | 1 × 10⁶ | 18289 | 55 |
| 5 | Single R4519 | 0 | 23324 | 0 |
| 6 | Single R4530 | 1 × 10⁶ | 25402 | 39 |
| 7 | Single R4530 | 0 | 26285 | 0 |
| 8 | 3 pool | 1 × 10⁶ | saturated | ~40 |
| 9 | 3 pool | 1 × 10⁵ | 23209 | 4.3 |
| 10 | 3 pool | 1 × 10⁴ | 24064 | 0.41 |
| 11 | 3 pool | 0 | 21137 | 0 |
| 12 | 3 pool | 1 × 10⁶ | 24885 | 40 |

[1078] Next, the sensitivity of a target detection in Cas13a digital droplet DETECTR assays containing guide RNA in either a pooled-guide format versus a single guide format was assayed. DETECTR reaction master-mixes was prepared for each gRNA (R4637, R4638, R4667, R4676, R4684, R4689, R4691, or R4785 (RNaseP)) and included, in addition to the gRNA, the Cas13a nuclease, and the reporter substrate. After complexing, 2 μL of each RNP was combined in either a pooled-gRNA format (a pool of the seven gRNAs, i.e., R4637, R4638, R4676, R4689, R4691, R4667, and R4684) or remained in the single-gRNA format (wherein R4667, R4684, and R4785 (RNAse P were present individually). The template RNAs (Twist SC2, ATCC SC2, and 5s-87 off-target) were diluted to obtain a series of template concentrations. DETECTR reactions directed to the detection of the template RNAs (Twist SC2, ATCC SC2, and 5s-87 off-target template RNAs) were assembled by combining the Cas13a-gRNA RNPs with the diluted template RNA from the previous step as shown in Table 9. The assembled DETECTR reactions were loaded into chambers on a Stilla Sapphire Chip. The Chips were placed into the Naica® Geode system and crystals were generated using the droplet generation program and imaged to reveal droplets that contain detected targets.

[1079] The sensitivity of target detection by the DETECTR assays containing the pooled guides (R4637, R4638, R4667, R4676, R4684, R4689, R4691) was compared with the sensitivity of target detection by the DETECTR assays containing the single guides R4684, R4667, R4785 (RNAseP guide) in individual format. Relative quantification performed by counting the number of these positive droplets showed that the samples containing the pooled guide RNAs generated more crystals containing the amplified products per copy of starting target RNA than the samples containing the guide RNAs in individual format as shown in FIG. 116. For example, the number of positive droplets from chamber 1 is higher than the number of droplets in chamber 2 and 3; and the number of droplets from chamber 5 is higher than the number of droplets in chambers 6 and 7 as shown in FIG. 116. Measurement of the target detection signal intensity from the chips also confirmed that the sensitivity of target detection per copy of starting target RNA by the DETECTR assays containing the pooled guides (R4637, R4638, R4667, R4676, R4684, R4689, R4691) was higher than the sensitivity of target detection by the DETECTR assays containing the single guides R4684, R4667, R4785 (RNAseP guide) in individual format as shown in FIG. 117. For example, signal intensity from chamber 1 (containing the seven-guide pool and the Twist SC2 template RNA is higher than the signal intensity in chamber 2 and 3 (containing the R4684, and the R4667 gRNAs in individual format respectively in the presence of the Twist SC2 RNA); and the signal intensity from chamber 5 (containing the seven-guide pool and the ATCC SC2 template RNA) is higher than the signal intensity in chambers 6 and 7 (containing the R4684, and the R4667 gRNAs in individual format respectively, in the presence of the ATCC SC2 RNA) FIG. 117. Similarly, the signal intensity from chamber 5 (containing the seven-guide pool and the ATCC SC2 template RNA) is higher than the signal intensity in chamber 6 (containing the gRNA R4684 in individual format and the ATCC SC2 RNA), the signal intensity from chamber 8 (containing the control RNaseP gRNA in individual format with the ATCC SC2 template RNA) and the signal intensity from chamber 12 (containing the seven pooled gRNAs with no template RNA) FIG. 117.

[1080] Relative quantification of the number of droplets containing amplified target (per copy of starting target RNA) observed in chamber 5 (containing the seven-guide pool and the ATCC SC2 template RNA) is higher than the number of droplets observed in chamber 6 (containing the gRNA R4684 in individual format and the ATCC SC2 RNA), the number of droplets observed in chamber 8 (containing the control RNaseP gRNA in individual format with the ATCC SC2 template RNA) and the number of droplets observed in chamber 12 (containing the seven pooled gRNAs with no template RNA) as shown in FIG. 118. The sensitivity of target detection by the assays containing the pooled guides (R4637, R4638, R4667, R4676, R4684, R4689, R4691) was compared with the sensitivity of target detection by the assays containing the single guides R4684, R4667, R4785 (RNAseP guide) in individual format, when the assays were conducted in a benchtop assay format FIG. 119. Results from the bench top assay showed that the samples containing the pooled guides (R4637, R4638, R4667, R4676, R4684, R4689, R4691) was not higher than the sensitivity of target detection by the in the samples containing the single guides R4684, R4667, or R4785 (RNAseP guide) in individual format as shown in FIG. 119.

[1081] Table 9 displays the guide pool and template per chamber.

| Chamber | Guide | Template |
|---|---|---|
| 1 | 7 pool | 5000 copies Twist SC2 |
| 2 | R4684 | 5000 copies Twist SC2 |
| 3 | R4667 | 5000 copies Twist SC2 |
| 4 | R4785(RNaseP) | 5000 copies Twist SC2 |
| 5 | 7 pool | 5000 copies ATCC SC2 |
| 6 | R4684 | 5000 copies ATCC SC2 |
| 7 | R4667 | 5000 copies ATCC SC2 |
| 8 | R4785(RNaseP) | 5000 copies ATCC SC2 |
| 9 | 7 pool | 5000 copies 5s-87 |
| 10 | R4684 | 5000 copies 5s-87 |
| 11 | R4667 | 5000 copies 5s-87 |
| 12 | 7 pool | NTC |

### Example 21: Assay Testing Using Bead Immobilized Reporters Following HotPot Protocol

[1082] FIG. 152 shows a drawing illustrating the manual HotPot experimental protocol used to test bead-immobilized reporter cleavage. A sample containing target nucleic acids was added to a tube containing lysis buffer (15201). After lysing 1-2 minutes at ambient temperature, the solution was transferred to a reaction tube (15202) containing lyophilized reagents (i.e., the base bead, the master mix bead, and the reporter bead). Contents of the reaction tube were rehydrated and reconstituted with lysis buffer, and the HotPot reaction was started and maintained at 55° C. for 30 minutes (15203). During the reaction, programmable nucleases in the solution cleaved reporter molecules from the beads at the same time as an RT-LAMP reaction proceeded to amplify the target nucleic acids (15204). The reaction medium was then filtered through a membrane to trap the beads and a first portion of the filtered product was used to measure fluorescence thereof on a fluorescence reader. A second portion of the filtered product was applied to a sample pad of a lateral flow strip. The lateral flow strip included a target capture area (T) comprising streptavidin and a control area (C) comprising IgG. The lateral flow strip assay was allowed to run for 3 minutes at ambient temperature (15205) before pictures were taken of the resulting bands at the target capture area T and the control area C.

[1083] FIG. 153 shows fluorescence DETECTR results with reporters immobilized onto glass beads. Experiments with both DNase and CasM.21526/R1763 showed larger fluorescence signal in the presence of target nucleic acids (2 nM, GF703) compared to the no target control experiments (NTC), thus the HotPot DETECTR reaction successfully cleaved the immobilized reporters from the glass beads. Experiments with CasM.21526 were carried out at 55° C. with H₂.B buffer. Experiments with DNase were carried out at 37° C. with 1× Turbo DNase buffer. FIG. 154 shows photographs of the lateral flow strips to which the DNase and CasM.21526 samples from FIG. 153 were applied.

[1084] FIG. 155 shows results with maleimide-coated magnetic beads immobilized with thiol-FAM reporter. Experiments with each protein (Cas14, CasM.21526, Cas12) resulted in larger signals with target nucleic acids (GF703) compared to the no target control experiments (NTC), thus the HotPot DETECTR reaction successfully cleaved the immobilized reporters from the maleimide-coated magnetic beads.

### Example 22: HotPot DETECTR-Based Assay for Respiratory Virus Targets

[1085] FIG. 156 shows the results HotPot DETECTR-based assays using the protocol shown in FIG. 152 with Cas14a. 1 for multiple different respiratory virus target nucleic acids including SARS-CoV-2, MS2, FluB, RSV-A, and RSV-B. Plots in the top row and the plots in the bottom row show the same data, with different y-axis scale. Each plot shows the raw fluorescence measured during the assay of unique nucleic acid sequences as a function of time. Depending on the target, the saturation signal strength varied from about 70000 AUs to 1000000 AUs, and the saturation time was reached in between about 20 to about 40 minutes (SARS-CoV-2=25 min, MS2=35 min, FluB=20 min, RSV-A=25 min, RSV-B=40 min). Depending on the target, the signal strength from the HotPot DETECTR assay ranged from about 1× to about 25× the signal strength of the SARS-CoV-2 reaction (SARS-CoV-2=1×, MS2=1×, FluB=25×, RSV-A=0.9×, RSV-B=7×).

### Example 23: HotPot Limit of Detection (LOD) Assay for SARS-CoV-2 Target

[1086] The following describes experiments carried out to determine limit of detection for HotPot reactions using Cas.M21526. The HotPot DETECTR-based assays were run using the protocol shown in FIG. 152. FIG. 157A shows results of experiments carried out using IB15 buffer with different target concentrations ranging from 200 copies to 0 copies. Multiple replicates were conducted at each concentration, and the results of each replicate are shown as individual lines in the plots. FIG. 157B shows an aggregated plot of the data in FIG. 157A where the average and the error from the multiple replicates are plotted in a single plot. FIG. 157C shows the saturation fluorescence heatmap of the multiple replicates (from 1 to 7) of FIG. 157A at different target concentrations. Strong signal was produced at all target concentrations, with about 5 copies being the LOD for the experimental conditions tested.

### Example 24: Additive Screening for SARS-CoV-2 Target HotPot

[1087] These experiments were conducted to identify potential additives for HotPot assays. 96 potential additives were identified and individually screened for their influence on the output fluorescence. FIG. 158 shows the fluorescence detected from the assays when using a target concentration of 200 copies/reaction (left column) and when using a target concentration of 0 copies/reaction (i.e., no target, right column). The color intensity of the squares in the heatmap indicate the strength of the fluorescence detected.

[1088] Additives that were identified to increase the speed of the reaction under the conditions tested included: betaine monohydrate, acetamide, GABA, L-proline, beta-alanine, 6-aminohexanoic acid, urea, methylurea, ethylurea, hypotaurine, NDSB-256, and ammonium acetate.

[1089] Additives that were identified to increase the signal strength from the reaction under the conditions tested included: trehalose, xylitol, D-sorbitol, sucrose, and trimethylamine N-oxide dihydrate.

[1090] FIG. 159A shows the influence of some additives that increased the speed of the reaction under the conditions tested. The influence of each additive (e.g., betaine monohydrate, NDSB-256, and beta-alanine) is shown against control experiments carried out with added water (i.e., without additive). Experiments carried out with no target (i.e., 0 copies/reaction) showed negligible fluorescence signals. In each scenario, the presence of the additives reduced the amount of time it took for fluorescence signals to reach saturation point (i.e., a plateau in the plot).

[1091] FIG. 159B shows the influence of some additives that increased the signal strength of the reaction under the conditions tested. The influence of each additive (e.g., sucrose and xylitol) is shown against control experiments carried out with added water (i.e., without additive). Experiments carried out with no target (i.e., 0 copies/reaction) showed negligible fluorescence signal. In each scenario, the presence of the additives increased the overall fluorescence signal strength generated in the presence of targets.

[1092] FIG. 160 shows HotPot DETECTR results for various combinations of additives with 300 copies/reaction of Twist SC2 RNA or with no target controls (NTC). Experiments were conducted in the presence of different amounts of trimethylamine N-oxide dihydrate (TMAO, concentrations shown on top of columns), in combination with IB1 buffer (top row), IB13 (comprising IB1 buffer plus 1 mg/ml bovine serum albumin, middle row), or IB14 (comprising IB1 buffer plus 1 mg/ml bovine serum albumin and no Tween, bottom row). All conditions tested exhibited strong DETECTR signals, with 250 mM TMAO appearing to provide the strongest signal in all buffer conditions.

[1093] Further HotPot experiments were carried out to determining the effects of using glycerol free (GF) Bsm DNA polymerase and glycerol (G) containing Bsm DNA polymerase with or without 250 mM TMAO added. FIG. 161 shows that both G and GF Bsm DNA polymerases were able to output satisfactory fluorescence signals with each formulation.

### Example 25: DETECTR-Based OnePot and HotPot Reactions Using Reporter Immobilization within Hydrogels

[1094] These experiments were carried out to synthesize hydrogels containing immobilized reporters co-polymerized with a mixture of oligomers as described in FIG. 149 and FIGS. 150A-150B and determine their applicability for OnePot and HotPot DETECTR assays. FIG. 149 illustrates the hydrogel structure with a covalently incorporated reporter that was generated via co-polymerization with the reporter.

[1095] Reporter was covalently incorporated into PEG hydrogels during polymerization. A 2:1 ratio mixture of unfunctionalized PEG (MW=600 monomers) and PEG-diacrylate (MW=700 monomers) were mixed together with a photoinitiator (2-Hydroxy-2-methylpropiophenone (Darocur 1173)) and 100 μM of Acrydite-modified Reporter 172 (/5Acryd/TTT TTT TTT TTT TTT TTT TT/16-FAMK//3Bio/(SEQ ID NO: 1482)). The mixture was exposed to UV light (365 nm, 200 ms) under a photomask. The mask was configured to polymerize the mix into circular cross-sectional rods of hydrogel 400 μm in diameter. Excess material was washed off hydrogels after polymerization. The acrydite group on the 5′ end of the reporter was covalently reacted with the acrylate groups of PEG-diacrylate oligomers during co-polymerization in order to incorporate the reporter into the hydrogel.

[1096] OnePot (using a Cas 12 enzyme) and HotPot (using Cas14a.1) DETECTR reactions were run as described herein by applying the programmable nuclease complexes and target nucleic acids to a tube containing the hydrogels. 6 hydrogels/reaction were added for OnePort DETECTR and 10 hydrogels/reaction for Cas14a. 1 HotPot DETECTR assays. DETECTR reactions were run for 60 min at 37° C. with mixing for Cas 12 OnePot or 60 min at 55° C. with mixing for Cas14a.1 HotPot. Duplicate reactions were run for each of a target RNA and the NTC for both Cas 12 OnePot and Cas14a. 1 HotPot.

[1097] The tubes were then spun down and the supernatant was applied to lateral flow strips. The sample pad of lateral flow strip contained anti-FITC conjugate particles (colloidal gold). If target was present, the supernatant contained cleaved FAM-biotin-labeled reporter molecules which bound to an anti-biotin (e.g., streptavidin) target line on the lateral flow strip. The anti-FITC conjugate particles bound the FAM moiety on the reporter molecules and a target band appeared on lateral flow strips at the anti-biotin target line. If target was not present (as in NTC DETECTR reactions), the supernatant did not contain any FAM-biotin-labeled molecules and nothing bound to the anti-biotin target line. The lateral flow assay strip also contained an anti-IgG flow control line, downstream of the anti-biotin target line, which bound to the anti-FITC moiety of the conjugate particles to confirm that the lateral flow assay functioned properly. FIG. 162A shows the results of the Cas12 OnePot DETECTR assays. FIG. 162B shows the results of the Cas14a. 1 HotPot DETECTR assays. Strong signals were seen in both positive sample replicates while minimal background appeared in NTC replicate strips at the target line.

### Example 26: DETECTR-Based OnePot and HotPot Reactions Using Guide Nucleic Acid and Reporter Immobilization within Hydrogels

[1098] This example demonstrates a method of making and using a hydrogel comprising immobilized guide nucleic acids and reporters.

[1099] Guide nucleic acids are covalently incorporated into PEG hydrogels during polymerization. A 2:1 ratio mixture of unfunctionalized PEG (MW-600 monomers) and PEG-diacrylate (MW=700 monomers) are mixed together with a photoinitiator (2-Hydroxy-2-methylpropiophenone (Darocur 1173)), 100 μM of Acrydite-modified Reporter 172 (/5Acryd/TTT TTT TTT TTT TTT TTT TT/16-FAMK//3Bio/(SEQ ID NO: 1482)), and 100 μM of Acrydite-modified guide nucleic acids (e.g., R1763 with acrydite modification: /5 Acryd/UAA UUU CUA CUA AGU GUA GAU CCC CCA GCG CUU CAG CGU UC (SEQ ID NO: 1483), or R1965 with acrydite modification:/5Acryd/rUrArAr UrUrUr CrUrAr CrUrAr ArGrUr GrUrAr GrArUr UrUrAr CrArUr GrGrCr UrCrUr GrGrUr CrCrGr Ar G (SEQ ID NO: 1484)). The mixture is exposed to UV light (365 nm, 200 ms) under a photomask. The mask is configured to polymerize the mix into circular cross-sectional rods of hydrogel 400 μm in diameter. Excess material is washed off hydrogels after polymerization. The acrydite group on the 5′ end of the reporters and the acrydite group on the 5′ end of the guide nucleic acids are covalently reacted with the acrylate groups of PEG-diacrylate oligomers during co-polymerization in order to incorporate the reporters and the guide nucleic acids into the hydrogel.

[1100] OnePot (using a Cas12 enzyme) and HotPot (using Cas14a.1) DETECTR reactions are run as described herein by applying the programmable nucleases and target nucleic acids to a tube containing the hydrogels. 6 hydrogels/reaction are added for OnePort DETECTR and 10 hydrogels/reaction for Cas14a. 1 HotPot DETECTR assays. DETECTR reactions are run for 60 min at 37° C. with mixing for Cas 12 OnePot or 60 min at 55° C. with mixing for Cas14a. 1 HotPot. Duplicate reactions are run for each of a target RNA and the NTC for both Cas 12 OnePot and Cas14a.1 HotPot.

[1101] The tubes are then spun down and the supernatant is applied to lateral flow strips. The sample pad of lateral flow strip contains anti-FITC conjugate particles (colloidal gold). If target is present, the supernatant contains cleaved FAM-biotin-labeled reporter molecules which bind to an anti-biotin (e.g., streptavidin) target line on the lateral flow strip. The anti-FITC conjugate particles bind the FAM moiety on the reporter molecules and a target band appeared on lateral flow strips at the anti-biotin target line. If target is not present, the supernatant does not contain any FAM-biotin-labeled molecules and nothing binds to the anti-biotin target line. The lateral flow assay strip also contains an anti-IgG flow control line, downstream of the anti-biotin target line, which binds to the anti-FITC moiety of the conjugate particles to confirm that the lateral flow assay functions properly.

### Example 27: DETECTR-Based OnePot and HotPot Reactions Using Programmable Nuclease, Guide Nucleic Acid, and Reporter Immobilization within Hydrogels

[1102] This example demonstrates a method of making and using a hydrogel comprising immobilized programmable nucleases, guide nucleic acids, and reporter.

[1103] Guide nucleic acids are covalently incorporated into PEG hydrogels during polymerization. A 2:1 ratio mixture of unfunctionalized PEG (MW=600 monomers) and PEG-diacrylate (MW=700 monomers) are mixed together with a photoinitiator (2-Hydroxy-2-methylpropiophenone (Darocur 1173)), 100 μM of programmable nuclease (e.g., Cas12 or Cas14a.1), 100 μM of Acrydite-modified Reporter 172 (/5Acryd/TTT TTT TTT TTT TTT TTT TT/16-FAMK//3Bio/(SEQ ID NO: 1482)), and 100 μM of Acrydite-modified guide nucleic acids (e.g., R1763 with acrydite modification:/5Acryd/UAA UUU CUA CUA AGU GUA GAU CCC CCA GCG CUU CAG CGU UC (SEQ ID NO: 1483), or R1965 with acrydite modification:/5Acryd/rUrArAr UrUrUr CrUrAr CrUrAr ArGrUr GrUrAr GrArUr UrUrAr CrArUr GrGrCr UrCrUr GrGrUr CrCrGr Ar G (SEQ ID NO: 1484)). The mixture is exposed to UV light (365 nm, 200 ms) under a photomask. The mask is configured to polymerize the mix into circular cross-sectional rods of hydrogel 400 μm in diameter. Excess material is washed off hydrogels after polymerization. The acrydite group on the 5′ end of the reporters and the acrydite group on the 5′ end of the guide nucleic acids are covalently reacted with the acrylate groups of PEG-diacrylate oligomers during co-polymerization in order to incorporate the reporters and the guide nucleic acids into the hydrogel. The programmable nucleases are immobilized by complexing with guide nucleic acids.

[1104] OnePot and HotPot DETECTR reactions are run as described herein by applying target nucleic acids to a tube containing the hydrogels. 6 hydrogels/reaction are added for OnePort DETECTR and 10 hydrogels/reaction for HotPot DETECTR assays. DETECTR reactions are run for 60 min at 37° C. with mixing for OnePot or 60 min at 55° C. with mixing. Duplicate reactions are run for each of a target RNA and the NTC for both OnePot and HotPot.

[1105] The tubes are then spun down and the supernatant is applied to lateral flow strips. The sample pad of lateral flow strip contains anti-FITC conjugate particles (colloidal gold). If target is present, the supernatant contains cleaved FAM-biotin-labeled reporter molecules which bind to an anti-biotin (e.g., streptavidin) target line on the lateral flow strip. The anti-FITC conjugate particles bind the FAM moiety on the reporter molecules and a target band appeared on lateral flow strips at the anti-biotin target line. If target is not present, the supernatant does not contain any FAM-biotin-labeled molecules and nothing binds to the anti-biotin target line. The lateral flow assay strip also contains an anti-IgG flow control line, downstream of the anti-biotin target line, which binds to the anti-FITC moiety of the conjugate particles to confirm that the lateral flow assay functions properly.

### Example 28: Positive Feedback Loop System for Amplifying Signals

[1106] This example demonstrates a positive feedback loop system for amplifying the signal for each target nucleic acid molecule in a sample as described in FIG. 151.

[1107] A mixture comprising programmable nucleases (15101), primary target-specific guide nucleic acids (15102), and primary target nucleic acids (15103) is flowed over a well. The well comprises two types of hydrogels. The first type of hydrogel (15105) contains secondary target-specific guide nucleic acids (15104) that are each immobilized by a single-stranded DNA molecule (15106) onto or into the first hydrogel (15105). The second type of hydrogel (15109) contains double stranded secondary target nucleic acids (15108) immobilized onto or into the second hydrogel (15109). The first programmable nuclease is complexed to the primary target-specific guide nucleic acid (15102). The second programmable nuclease is not bound to a guide nucleic acid.

[1108] The first programmable nucleases complexed with the primary target guide nucleic acids (15102) binds to the primary target nucleic acids (15103) to create activated programmable nuclease complexes that trans-cleave nearby single-stranded nucleic acid species. The species include reporters (15111), e.g., free-floating in solution or immobilized to a substrate or hydrogel e.g., adjacent the single-stranded DNA molecules (15106) and/or secondary target nucleic acids, as described herein and the single-stranded DNA molecules (15106) immobilizing the secondary target-specific guide nucleic acids (15104) on or in the first hydrogel (15105). Cleavage of the single-stranded DNA linkers (15104) releases the secondary target-specific guide nucleic acids (15104) from the first hydrogel (15105). This leads to a free-floating population of secondary target-specific guide nucleic acids (15104) in solution. The free-floating secondary target-specific guide nucleic acids (15104) complex with the second programmable nucleases. The second programmable nucleases are then able to bind to the secondary target nucleic acids (15108) immobilized on the second hydrogel (15109) to form activated programmable nuclease complexes that trans-cleave nearby single-stranded nucleic acid species, including reporters (15111) and the single-stranded DNA molecules (15106) on the first hydrogel (15105). This in turn leads to more additional cleavage of reporters (15111) and secondary target-specific guide nucleic acids (15104) in solution, which in turn goes on to create more activated programmable nuclease complexes that release further secondary target-specific guide nucleic acids (15104) into the solution, and so on, thereby amplifying the initial signal from the primary target nucleic acids.

[1109] The immobilized nucleic acids (guide nucleic acids, secondary target nucleic acids) comprise fluorescent moieties and quencher moieties. Cleavage of the immobilized nucleic acids separates the quencher moieties from the fluorescent moieties, thereby allowing the fluorescent moieties to produce a detectable fluorescent signal. The fluorescent moieties remain bound to the hydrogels (15105, 15109) after cleavage, which results in an increase in fluorescence at the hydrogel locations. Thus, the amplified signals can be detected by an optical instrument.

### Example 29: Integrated Sodium Acetate LAMP Reaction Consumable Handheld Device

[1110] This example demonstrates a handheld device comprising an integrated sodium acetate LAMP reaction consumable handheld device. The purpose of the handheld device is to provide a heating source for programmable nuclease-based detection applications that do not allow for battery or other electrical power supplies. The integrated sodium acetate LAMP reaction consumable provides heating to LAMP and programmable nuclease-based reactions via heat released from the crystallization of liquid-phase sodium acetate. The design of the integrated sodium acetate LAMP reaction consumable allows for uniform heating of the LAMP and programmable nuclease-based reactions by uniformly surrounding the LAMP reaction with sodium acetate heating agent in a heating reservoir.

[1111] In the integrated sodium acetate LAMP reaction consumable handheld device, liquid-phase sodium acetate is stored in a heating reservoir as shown in FIG. 163D. Six lateral flow strips (LFS) are placed inside the troughs on the detection tray as shown in FIGS. 163A-163C. LAMP reagents and programmable nuclease-based detection reagents (e.g., programmable nucleases, guide nucleic acids, and reports) are inserted into the 6 reaction chambers shown in FIG. 163A by a user with a pipette. A sample loading layer (e.g., an aliquot chip) is assembled over the reaction chambers as shown in FIG. 163B. In other examples, the reagents come pre-loaded into the reaction chambers and the sample loading layer is pre-assembled onto the rest of the device housing. Samples are added into the sample well as shown in FIGS. 163B-163C. Capillary forces and gravity start the aliquoting of the sample into the sample loading channel and sample loading chambers automatically. A 10 mL syringe (piston drawn up) is threaded on over the sample well as shown in FIG. 163C. The piston of the syringe is then pushed down to drive the remaining sample volume into the sample loading chambers and the appropriate reaction chambers. A frit at the end of each fluid channel downstream of the pressure cracking valve relieves excess pressure as fluids are pushed into the reaction chambers as shown in FIG. 163C. A piercer (not shown), pierces through a heating reservoir film surrounding the heating reservoir to activate the sodium acetate therein. The reaction chamber is heated by the sodium acetate and the isothermal LAMP amplification and programmable nuclease-based detection reactions are initiated. After 40 minutes, the reactions are complete. The detection tray is then pushed forward into the housing to connect the lateral flow assay strips to their respective reaction chambers and the fluid inside the reaction chambers drips down to the lateral flow assay strips and starts the capillary processes as shown in FIG. 163D. Results will be ready 2 minutes after the sample begins the capillary process across the lateral flow assay strips. In the presence of a target nucleic acid(s), the reporters in the reaction chamber(s) will be cleaved during the programmable nuclease-based detection reaction and the cleaved reporter are detected on detection regions or spots of the lateral flow assay strip(s) as described herein.

### Example 30: DETECTR-Based HotPot Reactions Using Thermostable Inorganic Pyrophosphatase

[1112] This example demonstrates compositions and methods for HotPot reactions using thermostable inorganic pyrophosphatase (TIPP) to improve signal generation. TIPP is an enzyme that can catalyze the hydrolysis of inorganic pyrophosphates. This example demonstrates compositions and methods for HotPot reactions using thermostable inorganic pyrophosphatase (TIPP) to amplify output signals.

[1113] HotPot reactions were carried out under with various compositions as shown in Table 10. In the Experimental Condition, the HotPot reaction was carried out in a solution comprising both TIPP and target nucleic acid. In Control A, the HotPot reaction was carried out with target nucleic acid but without TIPP. In Control B, HotPot reaction was carried out without target RNA. In Control C, HotPot reaction was carried out without TIPP and without target RNA.

| | Amount in (μL) | | | |
|---|---|---|---|---|
| | Experimental | Control | Control | Control |
| Component | Condition | A | B | C |
| Nuclease-free water | 1.975 | 1.975 | 1.975 | 1.975 |
| 5X IB 15 | 2 | 2 | 2 | 2 |
| 10 mM dNTP (NEB) | 1 | 1 | 1 | 1 |
| 100 μM rep033 | 0.1 | 0.1 | 0.1 | 0.1 |
| RNase Inhibitor, Murine | 0.05 | 0.05 | 0.05 | 0.05 |
| (NEB) | | | | |
| Bsm (Thermo) | 0.5 | 0.5 | 0.5 | 0.5 |
| Warmstart RTx (NEB) | 0.125 | 0.125 | 0.125 | 0.125 |
| Cas14a complexing | 1 | 1 | 1 | 1 |
| reaction | | | | |
| 10X Primer Mix | 1 | 1 | 1 | 1 |
| TIPP (2U/μL) | 0.25 | — | 0.25 | — |
| Target RNA | 2 | 2 | — | — |
| Total | 10 | 9.75 | 8 | 7.75 |

[1114] Briefly, in a first experimental example, Cas14a effector proteins were complexed with sgRNA for 30 minutes at 37° C. The 1× concentration of proteins was 40 nM and the final concentration of sgRNA was 40 nM. 1 uL of the Cas14a complexing reaction was combined with the HotPot components listed in Table 9 for each experimental or control condition listed. Reactions were carried out at 55° C. for 60 minutes. Trans cleavage activity was detected by fluorescence signal upon cleavage of a fluorophore-quencher reporter in the HotPot DETECTR reaction. FIG. 164 shows HotPot reaction results under the various conditions. The experimental condition, compared to control A without TIPP, had greater than 5-fold increase in the output fluorescence signal, while control A still had significantly higher signal than control D (no TIPP or target nucleic acid) and both conditions were able to detect the target nucleic acid. Control B without target RNA had about the same output fluorescence signal as control C without TIPP and without target RNA.

[1115] In a second experimental example, a 2:1 ratio mixture of unfunctionalized PEG (MW=600 monomers) and PEG-diacrylate (MW=700 monomers) were mixed together with a photoinitiator (2-Hydroxy-2-methylpropiophenone (Darocur 1173)) and 100 μM of Acrydite-modified “Rep172” reporter (/5Acryd/TTT TTT TTT TTT TTT TTT TT/16-FAMK//3Bio/(SEQ ID NO: 1482)). The mixture was exposed to UV light (365 nm, 200 ms) under a photomask to generate circular cross-section rods of hydrogel containing immobilized reporters. Cas14a effector proteins were complexed with sgRNA for 30 minutes at 37° C. The 1× concentration of proteins was 40 nM and the final concentration of sgRNA was 40 nM. 5 μL of these RNPs was combined with the following components for a final volume of 50 μL (listed at final concentration): 10 μL of target RNaseP RNA (45 pg/uL) or no target control (“(−)”), reporter-immobilized hydrogels (10 hydrogels/uL), IB15 one pot LAMP trans-cleavage buffer, dNTPs (1 mM), RNAse inhibitor, Bsm DNA polymerase, Warmstart RTx reverse transcriptase, RNase P LAMP primer mix, and TIPP (0.5 U/uL) or water (“no TIPP”). Reactions were carried out at 55° C. for 35 minutes. Trans cleavage activity was detected with lateral flow assay strips. The supernatant for each reaction was applied to the sample pad of a lateral flow assay strip containing anti-FITC conjugate particles (colloidal gold). If trans cleavage occurred, the supernatant contained cleaved FAM-biotin-labeled reporter molecules which bound to an anti-biotin (e.g., streptavidin) target line on the lateral flow strip. The anti-FITC conjugate particles bound the FAM moiety on the reporter molecules and a target band appeared on lateral flow strips at the anti-biotin target line. If trans cleavage did not occur (as in NTC or no guide RNA reactions), the supernatant did not contain any FAM-biotin-labeled molecules, and nothing bound to the anti-biotin target line. The lateral flow assay strip also contained an anti-IgG flow control line, downstream of the anti-biotin target line, which bound to the anti-FITC moiety of the conjugate particles to confirm that the lateral flow assay functioned properly. Lateral flow strips without TIPP are shown in FIG. 165A and lateral flow strips with TIPP are shown in FIG. 165B. The presence of target RNA is indicated with (+) and the absence of target RNA is indicated with (−). As in the case with a fluorescent signal output, lateral flow assay signal was improved by the addition of TIPP.

[1116] Without being bound to any particular theory, it is believed that TIPP may be responsible for processing phosphates which are produced when the LAMP reaction uses up dNTPs. Those phosphates can take Mg2 ions out of solution, which may be cause a Cas enzyme to exhaust the remaining Mg2 quickly and cause the reaction to plateau more rapidly than would occur with additional Mg2 in the system. With the presence of TIPP, those phosphates may be processed and the Mg2+ may be released for use by a Cas enzyme, which can improve DETECTR signal strength as the Cas enzyme is able to react unhindered by a lack of Mg2.

[1117] The results show that the addition of TIPP improved signal compared to without TIPP and made detection on lateral flow strips more robust. The amount of TIPP added can be varied to allow flexibility in assay designs.

### Example 31: Isothermal Nicking Enzyme Amplification for DETECTR Reactions

[1118] This example describes isothermal nicking enzyme pre-amplification for DETECTR reactions. CRISPR-based diagnostic DETECTR reactions using loop-mediated isothermal amplification (LAMP) can be completed in as little as 30 minutes. In some cases, longer LAMP amplification may be required to achieve single copy sensitivity. A DETECTR reaction utilizing nicking enzyme amplification (NEAR) was developed to reduce amplification time relative to methods utilizing LAMP amplification. The DETECTR reaction with NEAR also showed improved sensitivity over NEAR reactions performed with a beacon. In the DETECTR reaction with NEAR, a 30 to 40 nucleotide region of a target nucleic acid was amplified using NEAR and detected using a Cas12 variant (SEQ ID NO: 17).

[1119] NEAR amplification was performed by contacting the target nucleic acid with a forward primer, a reverse primer, dNTPs, a DNA polymerase, and a nicking endonuclease. The reaction was performed at 60° C. for 10 minutes then cooled to 4° C. The forward primer contained a 16 to 20 nucleotide region reverse complementary to a first strand of the target nucleic acid and a 16 to 20 nucleotide nicking enzyme stabilization, binding, and recognition site 5′ of the region reverse complementary to the target nucleic acid. The reverse primer contained a 16 to 20 nucleotide region reverse complementary to a second strand of the target nucleic acid and a 16 to 20 nucleotide nicking enzyme stabilization, binding, and recognition site 5′ of the region reverse complementary to the target nucleic acid. A NEAR duplex incorporating a nicking enzyme stabilization, binding, and recognition site into an amplicon also containing the region of the target nucleic acid was then generated, as illustrated in FIG. 166. The duplex was then nicked by the nicking endonuclease and amplified using the DNA polymerase. The amplicons were detected using a DETECTR reaction with the Cas12 variant as described in at least Examples 32-35.

### Example 32: Detection of a Strep-A Target Nucleic Acid Using DETECTR with NEAR

[1120] This example describes detection of Streptococcus pyogenes using NECTR (NEAR combined with DETECTR) via amplification of the Strep-A target. The Strep-A target was amplified using the process described in Example 31. Specific conditions were optimized for Strep-A detection.

[1121] A 10 μL preamplification reaction was prepared at a final concentration of 1× Isothermal Amplification® Buffer (NEB), 1×NEBuffer™ 3.1 (NEB), 300 nM dNTPs (NEB), 4U of Bst 2.0, 3U of Nt BstNBI, 500 nM of the forward primer (SEQ ID NO: 79), and 100 nM of the reverse primer (SEQ ID NO: 80). In order to prevent non-specific amplification, the primers were added last.

[1122] 8 μL of the prepared pre-amplification mixture was dispensed into a 96-well or 384-well plate. 2 μL of the target nucleic acid was added to each well in order to prevent early initiation of the reaction. Sample mixtures are mixed thoroughly and centrifuged to ensure that mixture is at the bottom of the wells. The pre-amplification reactions were incubated at 60° C. for 10 minutes and immediately placed at 4° C. or on ice to stop the reaction.

[1123] Detection of the Strep-A was achieved by our DETECTR technology via Cas12a. A Cas12a complexing reaction was prepared at a final concentration of 1× MB3, 160 nM of Cas12 variant (SEQ ID NO: 17) and 160 nM of R1107 crRNA (SEQ ID NO: 76) and incubated at 37° C. for 30 minutes. After incubation, the Beacon-AlexaFluor 594 (SEQ ID NO: 86) was added to the complexing reaction at a final concentration of 400 nM.

[1124] In a 384-well black assay plate on ice, 13 μL of the 1× MB3 and 5 μL of the Cas12a complexing mixture was added. Using aseptic technique to prevent any nucleic acid contamination, 2 μL of the pre-amplification reaction was added to the assay plate. The plate was sealed with an optically clear adhesive and spun at 2000 rcf. The plate was read at AF594 setting with extended gain. FIGS. 167A-167B, 169-171, and 177 show results obtained using variations of the Strep-A method described here.

TABLE 11
Nucleic acid sequences for NEAR reaction for Strep-A

| SEQ ID NO | Name | Sequence |
|---|---|---|
| SEQ ID NO: 84 | NEAR S-A | AGACTCCATATGGAGTCTAGCCAAACAGGAAC |
| | Primer F | A |
| SEQ ID NO: 85 | NEAR S-A | CGACTCCATATGGAGTCGAAAGCAATCTGAGGA |
| | Primer R | |
| SEQ ID NO: 86 | Beacon | ACAAGTATGTGAGGAGAGGCCATACTTGT |

### Example 33: Detection of a SARS-CoV-2 Target Nucleic Acid Using DETECTR with NEAR

[1125] This example describes detection of SARS-CoV-2 using NECTR (NEAR combined with DETECTR) via amplification of the E-gene target. The Strep-A target was amplified using the process described in Example 31. Specific conditions were optimized for E-gene detection.

[1126] A 10 μL preamplification reaction was prepared at a final concentration of 1× Isothermal Amplification Buffer (NEB), 1×NEBuffer 3.1 (NEB), 300 nM dNTPs (NEB), 4U of Bst 2.0, 3U of Nt BstNBI, 500 nM of the Forward primer (SEQ ID NO: 35), and 100 nM of the reverse primer (SEQ ID NO: 36). In order to prevent non-specific amplification, the primers were added last.

[1127] 8 μL of the prepared pre-amplification mixture was dispensed into a 96-well or 384-well plate. 2 μL of the target nucleic acid was added to each well in order to prevent early initiation of the reaction. Sample mixtures are mixed thoroughly and centrifuged to ensure that mixture is at the bottom of the wells. The pre-amplification reactions were incubated at 60° C. for 10 minutes and immediately placed at 4° C. or on ice to stop the reaction.

[1128] Detection of the Strep-A was achieved by our DETECTR technology via Cas12. A Cas12 complexing reaction was prepared at a final concentration of 1× MB3, 160 nM of Cas12 Variant (SEQ ID NO: 17), and 160 nM of R1107 crRNA (SEQ ID NO: 76) and incubated at 37° C. for 30 minutes. After incubation, the Beacon-AlexaFluor 594 (SEQ ID NO: 81) was added to the complexing reaction at a final concentration of 400 nM.

[1129] In a 384-well black assay plate on ice, 13 μL of the 1× MBuffer 3 and 5 μL of the Cas12a complexing mixture was added. Using aseptic technique to prevent any nucleic acid contamination, 2 μL of the pre-amplification reaction was added to the assay plate. The plate was sealed with an optically clear adhesive and spun at 2000×g rcf. The plate was read at AF594 setting with extended gain. FIGS. 168A-168B and 172A-176 show results obtained using variations of the SARS-CoV-2 E-gene method described here.

### Example 34: NEAR+DETECTR Reaction Optimization

### Determining the Mg2+ Concentration for a NEAR Reaction

[1130] This example describes optimization of Mg2+ concentration for the NEAR reaction. In addition, the performance of Bst 2.0 and Bst 3.0 were assessed. In this example, the protocol used was identical to that used in Example 31.

[1131] After amplification of Strep-A, the samples were tested in different buffers, Thrmopol, IsoAmp® I, and IsoAmp® II (NEB) at different added Mg2+ concentrations-0 mM, 2.5 mM, 5 mM, 7.5 mM, and 10 mM. The elapsed time at which it took to achieve a fluorescent readout from the Beacon plate reader was measured, with a lower value indicating that there were more copies of the amplicon present in the solution.

[1132] It was found that no additional magnesium was required and that Bst 2.0 was preferred for the NEAR reactions under the conditions tested. As shown in FIG. 171, Bst 2.0 was able to generate an observable fluorescent signal (˜20,000 copies) in less than 5 minutes. In FIG. 171, Bst 3.0 performed slightly slower in IsoAmp® I and IsoAmp® II buffers. Therefore, Bst 2.0 and a concentration of 12 mM Mg2+ were selected for future NEAR reaction conditions.

### Determining the Preferred Guide Sequence

[1133] This example describes how to select a guide RNA for detection of Strep-A, but it will be understood that the teachings described here may be used to select guides for other targets of interest as desired. The same primers and probe used in Example 32 were used. The following experiment determined if ssDNA could be detected using DETECTR from a NEAR reaction. Due to the biased reaction, gRNAs were generated in the reverse direction to detect any ssDNA produced from the nicking occurring on the forward primer nicking site.

[1134] A panel of 19 gRNAs was synthesized in order to determine which gRNA worked best in the DETECTR reaction under the conditions tested. As shown in FIGS. 167A-167B, all gRNAs successfully detected the positive control which comprised an oligonucleotide that was a complement of the gRNA. Guide RNAs 14-19 successfully detected the NEAR reaction products containing the target and positive control, but did not detect the NEAR negative control and negative (no input) controls. We observed that the maximum overlap with the guide RNA allowed was 3 nucleotides, otherwise signal detection in the negative controls were detected under the conditions tested.

### Characterizing NEAR RNA Targets Using DETECTR

[1135] This example describes quantification of NEAR RNA targets derived from SARS CoV-2 using the NECTR system described in Example 33. We used two NEAR primers to amplify the SARS-CoV-2 target sequence and a guide design as shown in FIG. 168A. As shown in FIGS. 168A-168B, the results of the SARS-CoV-2 E-gene DETECTR reaction are shown for samples including 20,000 NEAR copies or 0 NEAR copies. The DETECTR reaction successfully detected SARS-CoV-2 E-gene in the 20,000 target copy system and did not produce a signal in the 0 copy negative control conditions.

[1136] Next, we tried to determine the minimal incubation time of a NEAR reaction of Strep-A targets prior to detection via DETECTR. The NEAR protocol was substantially similar to that described in Example 32. Incubation of the target with NEAR reaction components proceeded for 30 seconds, 1 minute, 2 minutes, 3 minutes, 4 minutes, 5 minutes, or 6 minutes prior to DETECTR. Under the conditions tested, a minimum of 2 minutes was observed to be required to achieve a detectable DETECTR signal, however, 6 minutes was found to be more optimal as it achieved a signal much higher than the limit of detection, as shown in FIG. 169.

### Detecting NEAR RNA Targets Using Cas Variants

[1137] This example describes a comparison of NEAR amplicon detection using orthogonal Cas system to detect the target. The protocol of Example 32 was used for this example. Here, we utilized a Cas12 variant (SEQ ID NO: 17), a Cas13 variant (SEQ ID NO: 21), and a Cas14 variant (SEQ ID NO: 3). They were chosen because they have different cleavage preferences for the reporter molecule and can be multiplexed together. In FIG. 170, the Cas12 variant showed superior signal after NEAR DETECTR reaction under the conditions tested. These results showed that it is possible to multiplex different NEAR-DETECTR reactions with orthogonal Cas systems.

[1138] We also optimized the stability of the hairpin loop in the nickase stabilization region present in the NEAR primers. Without being bound to any particular theory, it is thought that the hairpin loop may impact the nickase activity of the enzyme. To test this, we used, alternative primer pairs to destroy, maintain, or enhance the hairpin loop formation (FIG. 173A). The performance of these new hairpin loops were tested on detection of SARS-CoV-2 E-gene as described in Example 33. In FIG. 173B, the destroyed hairpin loops showed reduced signal compared to both the normal and optimized hairpins, however, the enhanced hairpin showed strong signal even in the negative control under the conditions tested. It was determined that based on the results of this study that the normal primers would be used for future NEAR reactions.

### Determining the Optimal Reverse Transcriptase

[1139] This example describes comparison of different reverse transcriptases for the RT-NECTR reaction described in Example 33. In this study, we tested Wartmstart RTx (NEB), Bst 3.0, and Omniscript RT (Qiagen) and they were compared by using the limit of detection as a metric. FIG. 174 shows that Omniscript achieved a better limit of detection compared to the other two reverse transcriptases under the conditions tested.

### Optimizing Primer Concentrations

[1140] Primer concentrations were optimized in order to determine which concentrations would result in a better signal using the RT-NEAR reaction described in Example 33. In FIG. 175, primer concentrations of the forward and reverse NEAR primers were prepared at a concentration of 1000 nM, 750 nM, 500 nM, 250 nM nM, 100 nM, and 50 nM and mixed in a pairwise fashion in order to determine which concentration of forward and reverse primer will result in the best detectable signal. The forward primer used was M2805 (GAC TCC ACA CGG AGT Ctt gct ttc gtg gta tt (SEQ ID NO: 1503)) and the reverse primer used was M2811 (GAC TCC ACA CGG AGT Cgg atg gct agt gta ac (SEQ ID NO: 1504)). For this study, NEAR reactions were incubated and amplified targets for 5 minutes at 60° C. A combination of 1000 nM of the reverse primer and 500 nM of the forward primer performed best and resulted in a raw fluorescence greater than all other primer combinations tested. It was determined that by increasing the concentration of either the reverse or the forward primer resulted in increased efficiency of the reaction.

### Optimizing Amplification Times

[1141] Due to the need to reverse transcribe the SARS-CoV2 prior to detection, different amplification times need to be tested in order to determine the optimal resulting signal from RT-NECTR protocol of Example 33. In FIG. 176, different amplification times of 5 minutes, 10 minutes, and 20 minutes were tested on different cDNA (SARS-CoV2 E-gene) inputs (500, 250, 100, 75, 10, and 0 cDNA copies). In this experiment, higher amplification times resulted in increased DETECTR signal, however, even after 20 minutes of incubation, DETECTR only resulted in a slight signal in 10 copies. At 75 copies, 10 minutes of amplification was sufficient to detect 75 copies of SAR-CoV2 via DETECTR within 5 minutes.

### Example 35: Testing Cas System Orthogonality

[1142] This example describes testing of different Cas systems for orthogonality of the NEAR-DETECTR reaction described in Example 32. Cas14 variant (SEQ ID NO: 3) has been previously reported to detect ssDNA, whereas Cas13 variant (SEQ ID NO: 21) has been determined to be capable of detecting ssDNA. Thus, it was determined whether it was possible for the Cas14 variant or Cas 13 variant to be used in NEAR-DETECTR to detect ssDNA. As shown in FIG. 177, Strep-A was detected using the primers M2048 and M2049, using the Cas12 variant (SEQ ID NO: 17), Cas13 variant (SEQ ID NO: 21), and Cas14 variant (SEQ ID NO: 3) systems. Detection was shown to be possible with Cas13 and Cas14 systems, suggesting the possibility of multiplexing NEAR amplicons using Cas12/13 or Cas 14/13 reaction combinations.

### Example 36: HRP-Based DETECTR Utilizing Streptavidin Beads as a Solid Support for Immobilized Reporters Comprising HRP Signal Enhancement Enzymes

[1143] The objective of the experiment described was to produce a visible signal with an HRP-based DETECTR assay, particularly in the absence of target nucleic acid amplification. In this experiment, reporters comprising HRP and biotin were immobilized onto beads functionalized with Streptavidin via the biotin-Streptavidin interaction. A schematic can be seen in FIG. 197A.

[1144] Reporter immobilization to the beads. The HRP-reporters with biotin functional groups were immobilized onto 10 μL of streptavidin beads at reporter concentrations of 1 nM, 250 nM and 500 nM respectively.

[1145] HRP-based DETECTR Assay. To each of the three separate bead suspensions, at 1 nM reporter, 250 nM reporter and 500 nM reporter, respectively, the programmable nuclease Cas13 having SEQ ID NO: 21, complexed with the nucleic acid guide, and 4 nM of target was added and allowed to react at 37° C. for 30 minutes. In this step, the HRP portion of the reporter was released into solution via cleaving by the activated programmable nuclease-guide nucleic acid-target complex. The supernatant containing the cleaved HRP was then decanted from the bead suspension and combined with a solution containing the HRP enzyme substrate, TMB, at an approximate ratio of 2:1 (v/v) TMB to HRP supernatant. The HRP supernatant was first transferred to a fresh 96-well clear plate and then TMB was added to each well at approximately T=0. It takes about 20-30s from adding the TMB to starting the absorbance read on the plate reader. While the HRP enzyme consumed the substrate, TMB, the absorbance of the solution was measured. Results can be seen in FIGS. 197B-197D.

[1146] An HRP-based DETECTR Assay was performed at six target concentrations to determine a limit of detection (LOD). Six aliquots were taken from the bead suspension functionalized with HRP reporter at 250 nM. A Cas13 programmable nuclease complexed with guide nucleic acid was added to all six. Target was added to each of five aliquots to obtain target concentrations of 700 attM, 7 fM, 70 fM, 700 fM and 350 μM. No target was added to the sixth aliquot to act as the no-target control (NTC). Reactions in all six aliquots were carried out at 37° C. for 30 minutes. The supernatant containing the cleaved HRP was then decanted from the bead suspensions and separately combined with solutions containing the HRP enzyme substrate, TMB, at an approximate ratio of 2:1 (v/v) TMB to HRP supernatant. While the HRP enzyme consumed the substrate, TMB, the absorbance of the solutions was measured. Results can be seen in FIG. 197E. An LOD in the mid fM range was determined under the conditions tested.

### Example 37: HRP-Based DETECTR Utilizing Streptavidin-Coated Plates as a Solid Support for Immobilized Reporters Comprising HRP Signal Enhancement Enzymes

[1147] This example describes effects of different concentrations of reporter functionalized to a streptavidin-coated plate, and measurements to determine the limit of detection.

[1148] Reporter immobilization. The HRP-reporter, rep 194, as described herein, containing a biotin functional group was immobilized onto streptavidin plates in three separate aliquots, where the concentrations of reporter was 5 nM, 50 nM and 250 nM respectively. A schematic of the reporter can be seen in FIG. 198D.

[1149] HRP-based DETECTR Assay. To each of the three separate plates, at 5 nM reporter, 50 nM reporter and 250 nM reporter, respectively, a programmable nuclease Cas13, complexed with the nucleic acid guide, and 10 μM of target was added and allowed to react at 37° C. for 30 minutes. In this step, the HRP portion of the reporter was released into solution via cleaving by the activated programmable nuclease-guide nucleic acid-target complex. The supernatant containing the cleaved HRP was then decanted from the streptavidin-coated plates and combined with a solution containing the HRP enzyme substrate, TMB. While the HRP enzyme consumed the substrate, TMB, the absorbance of the solution was measured. Results can be seen in FIGS. 198A-C.

[1150] An HRP-based DETECTR Assay was performed at five target concentrations to determine a limit of detection (LOD). Five wells of a streptavidin-coated plate were functionalized with HRP reporter at 250 nM. Cas13 programmable nuclease complexed with guide nucleic acid was added to all five. To each of four wells, target was added to obtain target concentrations of 10 fM, 100 fM, 1 μM and 10 pfM. No target was added to the fifth well to act as the no-target control (NTC). All five conditions were allowed to react with the HRP-reporter-bound streptavidin-coated plates at 37° C. for 30 minutes. The supernatant containing the cleaved HRP was then decanted from the plates and combined with solutions containing the HRP enzyme substrate, TMB. While the HRP enzyme consumed the substrate, TMB, the absorbance of the solutions was measured. Results can be seen in FIG. 198D. An LOD of about 10 μM was determined in the 50 nM HRP-reporter bound wells under the conditions tested. An image of six wells of a plate containing the solutions analyzed in FIGS. 198A-198C can be seen in FIG. 198E, where the left-hand column contains eluate from the HRP-DETECTR reaction run with 10 μM target present, and the right-hand column contains eluate from the HRP-DETECTR reaction run without target present (no target control, NTC).

### Example 38: HRP-Based DETECTR Assay Utilizing Hydrogels

[1151] This example describes an HRP-DETECTR assay utilizing HRP-hydrogels comprising different PEG-DA ratios.

[1152] HRP-Hydrogel Prep. Preparation of HRP-hydrogels was similar to that described in Example 25 above. 22.5 μL of PEG/PEG-DA monomer mix was added to a PCR tube with 2.5 μL of reporter for a final concentration of either 10 μM or 1 μM reporter in 25 μL hydrogel mix. The mixture was vortexed and spun down briefly, then pipetted into a PDMS microfluidic channel on a glass slide. The hydrogel mixture was polymerized by exposure to 365 nm UV light (275 ms for 20% PEG-DA, 260 ms for 35% PEG-DA). Hydrogels were collected from the PDMS channel, collected, washed, resuspended, spun down, and supernatant removed, leaving about 100 μL of hydrogel. Hydrogels were stored in 1 mL of wash buffer at 4° C. overnight. The concentration of each hydrogel pool was determined by pipetting 1 μL onto a glass slide and counting particles under a microscope. Volume was adjusted to reach the desired final concentration.

[1153] HRP-Hydrogel DETECTR assay. Detection assays were performed using different PEG-DA concentrations (20% or 35%) co-polymerized with different concentrations of reporters (10 uM or 1 uM) comprising HRP-based detection moieties and acrydite functionalities (rep188). Samples included 4 nM of target, a no-template control (NTC), and an off-target control (OTC). The OTC sample included a nucleic acid with a different sequence from the target nucleic acid, and served as a control for the specificity of the reaction in that no signal was expected in response to the OTC. One of the reactions did not include any reporter (a “no rep control”). Two replicates were run for each condition (“prep 1” and “prep 2”).

[1154] The reactions were run as follows. 5 μL of hydrogel were aliquoted into single PCR tubes. Programmable nuclease detection complexes were prepared by combining 3.6 μL of nuclease-free water, 1 μL of 5× buffer, 0.08 μL of gRNA, 0.32 μL of 5 μM Cas enzyme SEQ ID NO: 34, and incubating at 37° C. for 20-30 minutes. 26 μL buffer was added to the PCR tubes containing hydrogels, along with 5 μL of detection complexes, and 4 μL of sample (i.e., target, NTC, or OTC). The final concentrations of components in the reaction were 40 nM gRNA, 40 nM Cas enzyme, and 4 nM target. The mixtures were vortexed, spun down briefly, and incubated for 30 minutes at 50° C. with no shaking. The reactions were stopped by placing on ice. Tubes were spun down for 5 minutes, and 10 μL of supernatant from each tube was pipetted to separate wells of a 96-well plate. 20 μL of TMB was added to the wells, and absorbance was read on a plate reader. Results for absorbance are illustrated in FIGS. 199A-199F.

### Example 39: HRP-DETECTR on NHS Activated Resin

[1155] In this example, an HRP-DECTER assay is demonstrated by immobilizing HRP-reporter onto NHS-activated resin.

[1156] HRP-reporter immobilization to NHS-activated resin. Columns were prepared and the assay were run according to the schematic illustrated in FIG. 200A. The columns were prepared by adding 400 μL of 1 nM reporter directly to the dry resin, and incubating at room temperature for 1 hour with end-over-end mixing. The top and bottom caps were removed, and the columns were placed in 2 mL collection tubes. The columns were centrifuged at 1000×g for 1 minute. The columns were then washed with 500 μL wash buffer (1× PBS+0.1% TWEEN-20) and centrifuged at 1000×g for 1 minute. This wash was repeated three times. 500 μL 1M ethanolamine was added to quench the remaining active sites, the top and bottom caps were replaced, and the contents mixed by end-over-end mixing for 15-20 minutes. The top and bottom caps were removed, the columns placed in 2 mL collection tubes, and centrifuged at 1000×g for 1 minute. The flow through was discarded. 500 μL was buffer was added, the columns centrifuged at 1000×g for 1 minute, and wash steps repeated three times. 400 μL wash buffer was added for storage upright overnight at 4° C. The columns were spun down to wash the overnight supernatant by centrifugation at 1000×g for 1 minute. The columns were washed three times with 500 μL wash buffer. 50 μL TMB was added to the last wash to make sure it did not turn blue. The columns were then ready for the assay.

[1157] HRP-DETECTR assay. The detection reagents were prepared by combining 313.2 μL nuclease free water (NFW), 78.4 μL 5× buffer, 0.08 μL crRNA, 0.32 μL of 5 μM Cas enzyme SEQ ID NO: 34, and the resulting 392 μL were added to the resin in the columns. Columns then received either 8 μL of 50 nM target or NFW, and were incubated on a thermomixer at 48° C. for 45 minutes at 500 RPM with intermittent shaking (15 seconds on, 2 minutes off). The columns were spun down and eluate collected. The columns were washed four times with 400 μL buffer, and the wash fractions were collected. 150 μL of eluate was added to wells of a clear 96-well plate. 50 μL of substrate (TMB) was added to each well and absorbance (optical density at 650 nm) was measured. Illustrative results are shown in FIGS. 200B-200E. A top-down image of the plate is shown in FIG. 200F. Wells 20007, 20008, 20009, and 20010 represent wash 1 for +target, eluate for +target, wash 1 for NFW, and eluate for NFW, respectively.

### Example 40: HRP DETECTR Limit of Detection Study Utilizing Poly HRP

[1158] This example describes an HRP-DETECTR assay the demonstrated 100 fM limit of detection utilizing a poly-HRP reporter.

[1159] Preparation of reporter resin. Carboxylic beads having a concentration of about 10 mg/mL were functionalized with a poly-HRP reporter, as illustrated in FIG. 196. At the concentrations and amounts used, there were approximately 14× 10⁹ reporter molecules per gram of beads.

[1160] HRP-DETECTR assay. Two different volumes of the reporter poly-HRP reporter conjugated beads were tested, 2 μL and 5 μL. A programmable nuclease having SEQ ID NO: 34 was complexed with guide nucleic acid and added to the beads. Reactions also included 10 fM, 100 fM, 0.5 pM, 1 pM, 10 pM, 100 pM or 1 nM of target, except for a no template control (NTC). The contents of the columns were then reacted for 45 minutes at 50° C. The liquid portion was then collected and added to a TMB solution. The absorbance of the mixture was measured over time, and results are illustrated in FIGS. 201A-201D.

### Example 41: Sample Lysis with Proteinase K

[1161] This example describes a method of lysing a sample with a protease to release nucleic acids so that they are accessible to a programmable nuclease (e.g., in a DETECTR reaction).

[1162] A sample comprising cells and/or viral particles is exposed to a lysis buffer solution comprising Proteinase K to digest the proteins (including RNAses, DNAses, matrix proteins, viral proteins, etc.) in the sample and release any nucleic acids therefrom. The sample is incubated in the lysis buffer solution at 37° C. for a pre-determined digestion time (e.g., 1 hour) to allow for proteolysis to occur. A serine protease inhibitor (e.g., PMSF) is then added and the mixture is incubated at 37° C. for a pre-determined inhibition time (e.g., 1 hour) to inactivate the Proteinase K. The programmable nuclease and additional detection reagents (e.g., guide nucleic acids, reporters, etc.) are then added to a mixture comprising the released nucleic acids and inactivated Proteinase K.

### Example 42: Signal Amplification with NucC

[1163] This example describes a method of detecting a target nucleic acid using a programmable nuclease, a guide nucleic acid, a first reporter, an enzyme, and a second reporter. In general, formation of a complex comprising the programmable nuclease, the guide nucleic acid, and the target nucleic acid activates the programmable nuclease (a Cas protein, in this example). The activated Cas protein cleaves the first reporter, releasing a first nucleic acid section (a cyclic adenylate, in this example), which activates the enzyme (NucC, in this example). NucC then cleaves the second reporter, which separates a fluorescent label from a quencher. Detection of the fluorescent label is used as an indicator for presence of the target nucleic acid in the sample.

[1164] In this detection scheme, Cas13 removes a blocking group from a linear RNA (blocked-activator). The blocking group is removed specifically due to the cleavage preferences of Cas13 for U's over A's. The shorter activator is now able to function to activate NucC. NucC then cleaves a dsDNA reporter molecule which generates a fluorescent or colorimetric signal. The Cas13 is capable of multiple turnovers and so is the NucC. The activity of these two proteins together generates a signal amplification effect, where the initial Cas13 detection of a pathogen or other nucleic acid sequence of interest is finally reported out by NucC. An illustrative schematic of this system is illustrated in FIG. 202, and illustrative first reporters are shown in FIG. 203 (poly-U based reporters for Cas13, poly-T based reporters for Cas12). Specific examples of first reporters (mod286, mod287, mod288, and mod289) and strands of a double-stranded second reporter (rep213 and rep214) are provided in Table 12 below.

TABLE 12
Exemplary first reporters and exemplary double-stranded second reporters

| Name | Sequence | Description |
|---|---|---|
| rep213 | /56-FAM/ | Top strand of dsDNA reporter, from White |
| | AGTGTTACATTATCCACCAT | lab |
| | GGCGAGCTTT (SEQ ID NO: | |
| | 1505) | |
| rep214 | AAAGCTCGCCATGGTGGATA | Bottom strand of dsDNA reporter from |
| | ATGTAACACT/3IABKFQ/ | White lab |
| | (SEQ ID NO: 1506) | |
| mod286 | rArArArUrUrUrUrUrUrU | Unmodified NucC blocked-activator |
| | (SEQ ID NO: 1507) | |
| mod287 | /52FA/rArArUrUrUrUrUrUrU | Modified NucC activator with fluorobase |
| | (SEQ ID NO: 1508) | in the first position |
| mod288 | rA/i2FA/rArUrUrUrUrUrUrU | Modified NucC activator with fluorobase |
| | (SEQ ID NO: 1509) | in the second position |
| mod289 | rArAr/i2FA/UrUrUrUrUrUrU | Modified NucC activator with fluorobase |
| | (SEQ ID NO: 1510) | in the third position |

### High-Temperature NucC Tolerance

[1165] The temperature tolerance of NucC was assessed in order to determine whether NucC retains its ability to cleave double-stranded DNA at temperatures above 37° C. and is compatible with DETECTR assays run at elevated temperatures with a thermostable programmable nuclease (e.g., a Cas13c, etc.). Cleavage assays were performed with Vibrio metoecus NucC (VmeNucC) in MB3 buffer with FQ double-stranded DNA reporter (rep213+214). The final concentration of activator (cyclic triadenylate activator) was 1 nM and the final VmeNucC concentration was 250 nM.

[1166] Each reaction was run for 60 minutes at a different temperature: 40° C., 45° C., 50° C., 55° C., 60° C., or 65° C. In parallel, a second series of reactions at the different temperatures were performed in the absence of the 1 nM activator. Graphical representations of the results with and without activator present during the reactions are shown in FIG. 213. It was found that VmeNucC was able to robustly cleave the double-stranded DNA reporter in the presence of 1 nM activator at all temperatures tested, making it a viable candidate for use in an elevated temperature signal amplification assay as described herein.

Activation of NucC Orthologs with Uncapped Linear Activators

[1167] The activity of NucC after addition of a linear activator was assessed in order to determine whether NucC could be activated by linear oligos, in addition to cyclic oligos, as shown in FIG. 202, which would greatly simplify manufacturing and design of appropriate activators. Cleavage assays were performed with VmeNucC and another NucC ortholog VmeNucC in MB3 buffer with FQ double-stranded DNA reporter (rep213+214). The final concentration of activator (uncapped mod286 with all adenosine residues removed by earlier Cas13 treatment) was 1 μM, 100 nM, 10 nm, 1 nM, 100 μM, or 0 nM and the final VmeNucC or FcoNucC (NucC from Faecalicatena contorta 2789STDY5834876) concentration was 250 nM.

[1168] Each reaction was run for 240 minutes with or without the presence of the linear activator at various concentrations. Graphical representations of the results with and without linear activator present during the reactions are shown in FIGS. 230A-230B. It was found that both VmeNucC and FcoNucC were able to be activated by the linear activator (uncapped mod286) under the conditions tested.

### Example 43: Signal Amplification Systems with HRP

[1169] This example describes results for several approaches to signal amplification of Cas-based detection of target nucleic acids using horseradish peroxidase (HRP). Systems included those based on surface-tethered HRP, magnetic bead-tethered HRP, magnetic bead capture of HRP, and processes that included an HRP concentration step.

[1170] Surface Tethered Approach: HRP was bound to the surface of functionalized plates (e.g., streptavidin, NHS, epoxy, etc.) by a DNA or RNA tether; details are specified in the results section below. Wells were washed 4× with wash buffer. After the final wash, Cas reaction buffer was added to each well, along with the Cas-gRNA complex. Target was then added to the reaction wells. Reactions were allowed to proceed at 37° C. for 30 minutes. The supernatant was then transferred to a second plate which contained the HRP substrate, TMB. Absorbance was then measured for 30 minutes at 37° C.

[1171] Magnetic Bead Tethered Approach: This process was similar to the surface-tethered approach, but the HRP was bound to the surface of functionalized magnetic beads. After incubating with activated Cas-gRNA complex at 37° C. for 30 minutes, the magnetic beads were pelleted with a magnet, and the supernatant was transferred to a plate containing the HRP substrate, TMB. Absorbance was then measured for 30 minutes at 37° C.

[1172] Magnetic Bead Capture Approach: HRP-biotin reporter was incubated in-solution with activated Cas complex at 37° C. for 30 minutes. Magnetic beads were then added to capture the intact reporter and allow HRP reporters that had been cleaved by the Cas complex to remain in solution. The supernatant was then transferred to a plate containing the HRP substrate, TMB. Absorbance was then measured for 30 minutes at 37° C.

[1173] HRP Concentration Approach: Anti-HRP antibodies were attached to agarose resin and the resin was loaded into an empty micro-spin column. Following the Magnetic Bead Tethered Approach or Magnetic Bead Capture Approach, the HRP-containing supernatant was transferred to the prepared column and incubated at ambient temperature for 30 minutes. The column was centrifuged and the flow through was discarded. The HRP substrate, TMB, was added to the column and incubated for 30 minutes at room temperature and then recovered by centrifugation. Stop Solution was then added to the column and recovered by centrifugation. The recovered TMB and Stop Solution were combined and the absorbance was measured.

### Evaluation of In-Solution HRP Reporter

[1174] Surface-tethered reporters provide various advantages detailed herein. However, in some early experiments, detection below 1 pM (about 15 million copies per reaction) was challenging in some implementations. In an effort to improve sensitivity for lower target concentrations, we redesigned the assay so that the HRP reporter would be cleaved in-solution and then the reporter captured onto magnetic beads. Without wishing to be bound by theory, it was believed that the Cas protein would have easier access to reporter targets in solution than those bound to a surface. An example illustration of the assay workflow is provided in FIG. 202.

[1175] We evaluated the impact of reporter concentration on the performance of the in-solution assay (FIG. 205) and the binding buffer for capturing the reporter (FIG. 206). These experiments revealed an optimal concentration of reporter to be captured by the magnetic beads (labeled “medium” in FIG. 205) that enabled detection down to at least 100 fM (1,500,000 copies per reaction) under the conditions tested. Lower reporter concentrations appeared to make the assay less sensitive and higher reporter concentrations increased the background to the point that differentiation between positive and negative reactions was more difficult. In this example, reporter concentrations of 0.5 nM, 1 nM, and 5 nM were designated “low,” “medium,” and “high,” respectively (see also FIG. 205).

[1176] We also evaluated the choice of magnetic bead and the binding buffer for the reporter (FIG. 206). This revealed that while multiple brands and sizes of magnetic beads perform similarly for HRP-biotin capture, the binding buffer can impact the ability to reduce the background of the assay. As shown in FIG. 206, Buffer 2 (a Cas activity buffer MBuffer1) reduces the ability of the beads to bind the biotin-HRP, whereas Buffer 1 (a manufacturer suggested binding buffer of phosphate buffered saline) was able to efficiently pull-down the reporter.

### Optimization of Magnetic Beads

[1177] As an alternative to the in-solution HRP reporter followed by capture, we also evaluated the possibility of reducing potential steric inhibition of the reporter cleavage reaction by increasing the length of the tether to better accommodate the size of the Cas protein. Instead of using functionalized plates or slides, we used magnetic beads, as we found these easier to manufacture and also increased the surface area available for the Cas to interact with while active. Our experiment demonstrated that a shorter reporter than we used initially showed lower signal and lower sensitivity than a longer reporter that was designed to allow for better access of the Cas protein to the cleavable region (e.g., single strand RNA region) (FIG. 207). The longer reporter included a 36-carbon spacer on the 5′ end and a 54-carbon spacer at the 3′ end, and is represented as follows (with iSp18 denoting 18-carbon spacers): 5BiotinTEG//iSp18//iSp18/TTT TTT TTT rUrUrU rUrUT TTT TTT TTT T/iSp18//iSp18//iSp18//3HRPMD/(SEQ ID NO: 1511). The shorter reporter lacked spacers, and is represented as follows: 5′ HRP-TTT TTT TTT TTT rUrUrUrUrU-TTT TTT TTT TTT-3′ Biotin-TEG (SEQ ID NO: 1512). The longer reporter increased the sensitivity of the assay and increased the signal at each target concentration without dramatically increasing the background. We next optimized the concentration and the reporter bound to the beads during their functionalization and the volume of the beads added to the DETECTR® reaction. As illustrated in FIG. 208, results showed that an optimized combination of bead concentration and bead volume enabled detection down to at least 50 fM (750,000 copies per reaction) under the conditions tested. Here, bead concentrations of 50 nM, 100 nM, and 200 nM were designated “low,” “medium” and “high,” respectively.

[1178] To evaluate the performance of the assay with the optimized reporter and bead concentrations, we performed a 22 replicate experiment with different concentrations of target nucleic acid, expressed in copies per reaction (“copies/rxn” or “cp/rxn”). Concentrations tested included 2,000,000 copies/rxn, 1,000,000 copies/rxn, 500,000 copies/rxn, and 0 copies/rxn, using ddPCR quantified synthetic SARS-CoV-2 RNA from Twist. Illustrative results are shown in FIG. 209. To demonstrate the specificity of the assay we also included 2,000,000 copies/rxn of FluA H3N2 synthetic RNA from Twist as an off-target control (OTC). The results of the experiment showed differentiation from both the 0 copies/rxn and 2,000,000 copies/rxn OTC conditions at 500,000 copies/rxn under the conditions tested. Differentiation from background was stronger at 2,000,000 copies/rxn and 1,000,000 copies/rxn.

### Optimization of Magnetic Beads

[1179] In the experiments discussed above in this example, the effective TMB and HRP concentrations were constrained by the volumes used for the DETECTR® reaction and the binding buffers. We hypothesized that capturing the HRP onto a surface after the cleavage reaction but before signal detection could provide better control over the TMB-HRP reaction kinetics.

[1180] FIG. 211 illustrates results of an experiment in which we compared the performance of the concentrated HRP to the regular HRP+DETECTR® reaction. However, we found that the added concentration step did not dramatically improve the performance of the assay. We evaluated several reasons for this result, including testing the performance of HRP and antibody bound HRP, which showed a decrease in HRP function when bound by an antibody (data not shown). Furthermore, we suspected that the TMB may not have sufficient time to interact with the HRP in the anti-HRP resin. We next evaluated whether adding TMB serially may improve the signal-to-noise ratio of the reaction. Results illustrated in FIG. 212 show that the addition of multiple rounds of TMB (5×10 μL and 3×50 μL) improved the signal in comparison to the same volume but given as a single volume (1×50 μL and 1×150 μL). Considering relatively weak performance in the control reaction, additional experiments and optimization would be beneficial.

### Example 44: Immobilization Facilitated Positive Feedback Loop System for Amplifying Signals with Two Programmable Nucleases

[1181] This example demonstrates a positive feedback loop system for amplifying the signal for each target nucleic acid molecule in a sample. The assay used in this example is illustrated diagrammatically in FIG. 214 and FIG. 215.

[1182] A mixture comprising a first programmable nuclease (21401, Cas #1) complexed with primary target-specific guide nucleic acids, a second programmable nuclease (21402, Cas #2) complexed with secondary target-specific guide nucleic acids immobilized to the surface, a secondary target nucleic acid (21403, target #2) immobilized to the surface, a reporter molecule in solution (21404), and finally, a primary target nucleic acid (21405, target #1) capable of interacting with the complex (21401, Cas #1) when introduced into solution. The programmable nuclease (21401, Cas #1) complex then trans-cleaves an ssDNA tether between the surface and the second programmable nuclease (21402, Cas #2) complex. This releases the second programmable nuclease (21402, Cas #2) into solution so it can recognize its corresponding target (21403, target #2) which activates the second programmable nuclease (21402, Cas #2) complex. The activation of the 21402 complex creates a feedback loop where further programmable nuclease 21402 can be released. Activated 21402 complex is also effective to transcollaterally cleave the reporter molecule. Cleavage of the immobilized nucleic acids separates the quencher moieties from the fluorescent moieties, thereby allowing the fluorescent moieties to produce a detectable fluorescent signal. In some embodiments, this assay can be conducted on hydrogels as described in Example 28. In some embodiments, this assay can be conducted using immobilized reporters as described in FIG. 216.

### Positive Feedback Loop Detection Assay for Low Copy Number Targets

[1183] Immobilized guide RNAs used in the assay to detect an immobilized secondary target (Target 2) were those shown in Table 13, with results shown in FIG. 216. Performance of the assay conditions were those described according to the following. A series of reactions were prepared with 7 spots each containing immobilized amine-modified dsDNA Target 2 (Mammuthus), ssDNA tether/guide RNA designed to hybridize to Target 2, and FAM-labeled reporter rep200 within N=1 NHS-coated wells. Four different ssDNA tether/guideRNA were tested-Mod343, Mod351, Mod321, or Mod322—as shown in TABLE 13. All cleavage reactions were carried out in DESPEC buffer in NHS-coated wells. Prior to initiating the detection assay, a Cas12 complexing reaction was prepared at a final concentration of 1× DESPEC buffer, 5 nM of a Cas12 variant (SEQ ID NO: 34), and 10 nM guide RNA R780 (targeting RNase P, “Target 1”) and incubated for 15 minutes at room temperature in solution to generate a first Cas complex as shown in FIG. 214 and FIG. 215 (21401, Cas #1). While the first Cas complex was being formed, uncomplexed Cas 12 variant was added to the prepared slide wells and allowed to complex with guideRNA immobilized to the slide to form an immobilized, second Cas complex as shown in FIG. 214 and FIG. 215 (21402, Cas #2). The first Cas complex (Cas #1, FIG. 214, 21401) was then added to slide wells along with 4 fM of RNaseP “Target 1” to initiate the detection assay and was incubated for 60 minutes at 55° C. on a thermomixer. Final fluorescence within the wells after 60 minutes was then imaged on a fluorescent microscope and analyzed for fold change in fluorescence versus fluorescence at time 0 (i.e., before the first Cas complex and first target were added to the wells). Reduced fluorescence (and a higher absolute fold change) indicated reporter cleavage and release of the FAM detection moiety from the surface of the well, with absolute fold change fluorescence results shown in FIG. 216 for each of the different immobilized guideRNAs tested.

TABLE 13
GuideRNAs for surface-immobilized target nucleic acid detection assays

| | |
|---|---|
| Mod343 | /5AmMC12/iSp18/iSp18/TTTTTTTTTTTTTTTTTTT/iSp18/iSp18/rUrArAr |
| | UrUrUrCrUrArCrUrArArGrUrGrUrArGrArUrGrCrCrGrArUrArArUrGrArU |
| | rGrUrArGrGrGrArU (SEQ ID NOS 1513 and 1485) |
| Mod351 | /5AmMC12/iSp18//TTTTTTTTTTTTTTTTTTT/iSp18/TArArUrUrUrCrUrArC |
| | rUrArArGrUrGrUrArGrArUrGrCrCrGrArUrArArUrGrArUrGrUrArGrGrGrAr |
| | U (SEQ ID NOS 1514 and 1486) |
| Mod321 | /5AmMC6/TTTTTTTTTTTTTTTTTTTTTTTTTTTTTTTTTTTTTTTTTTTTT |
| | AArUrUrUrCrUrArCrUrArArGrUrGrUrArGrArUrGrCrCrGrArUrArArUrGrAr |
| | UrGrUrArGrGrGrArU (SEQ ID NO: 1515) |
| Mod322 | /5AmMC6/TTTTTTTTTTTTTTTTTTTTrUrUrUrUTTTTTTTTTTTTTTTTTT |
| | TTTTTTTTAArUrUrUrCrUrArCrUrArArGrUrGrUrArGrArUrGrCrCrGrArUr |
| | ArArUrGrArUrGrUrArGrGrGrArU (SEQ ID NO: 1516) |

### Example 45: HRP-Bound gREP Spectrophotometric Assay for Detecting Target Nucleic Acids

[1184] This example describes production of a visible signal upon target nucleic acid detection, particularly in the absence of target nucleic acid amplification. In this experiment, reporters comprising HRP detection moieties linked to a tethered guide-reporter hybrid molecule (gREP) are immobilized to a surface by a linkage. The gREP forms a complex with a programmable nuclease, which is activated upon further complexing with a target nucleic acid. The activated programmable nuclease is effective to transcollaterally cleave one or more linkages connecting the HRP detection moiety to the remainder of the gREP. The HRP is released, and the supernatant containing the released HRP is then transferred to a secondary chamber containing an HRP substrate. When HRP is present in the supernatant it acts on the HRP substrate to produce a detectable signal. In some embodiments, the detectable signal can be detected by measuring an absorbance or fluorescence within the secondary chamber. A schematic representation of the assay is shown in FIG. 217.

### Example 46: Single-Step Nicking Enzyme Amplification Reaction (NEAR) with CRISPR-Based Detection of DNA and RNA (NECTR)

[1185] This example describes a single-step isothermal nicking enzyme amplification reaction (NEAR) for use with programmable nuclease-based detection reactions (e.g., DETECTR). The detection reaction incorporates CRISPR-based specificity with NEAR's rapid and robust amplification. A schematic of the NEAR amplification reaction can be found in FIG. 166, with particular attention being paid to primer and guide placement along with guide/primer overlap to aid in guide design.

[1186] LAMP, another isothermal amplification method, may take around 20-45 minutes of incubation time for sufficient amplification of a target sequence at a low copy number, which may be too long of a process for some point-of-care diagnostics settings. This duration can be mitigated through the incorporation of nicking enzyme assisted amplification reactions such as EXPAR, NEAR, and NEMA. In at least some instances, NEAR may be ideal for isothermal single-step reactions (e.g., HotPot reactions) due to its robust amplification speed at one temperature, though optimization may be beneficial in view of closely positioned primer pairs, which may be prone to off target activation. This example describes results showing development of NEAR for use with an illustrative Cas-based detection assay (e.g., DETECTR), which is ideal for amplifying and detecting targets of interest rapidly in a single-step reaction.

[1187] Cas variants were tested for performance in a high temperature and salt environment compatible with a single-step NEAR-detection reaction. Two-step NECTR reactions using a Cas 12 variant having SEQ ID NO: 34, along with two other thermostable variants (a Cas12 variant having SEQ ID NO: 120, and a Cas12 variant having SEQ ID NO: 116) were performed and showed high activity when run in NEAR buffer conditions (FIG. 218). Here, Cas complexing and DETECTR reactions were run in the NEAR reaction buffer (1× IsoAmp®+0.5×NEBuffer 3.1™). The Cas 12 variant, and other Cas variants (a Cas12 variant having SEQ ID NO: 120, and a Cas12 variant having SEQ ID NO:116), showed high activity when run in NEAR buffer conditions. Each Cas protein (40 nM final concentration) was pre-complexed with its guide nucleic acid (40 nM final concentration) at 37° C. for 30 mins in the NEAR reaction buffer. For each reaction, NEAR was performed on SARS-CoV-2 target RNA (500 copies/reaction, Twist, or 0 copies/reaction “NTC”) at 60° C. for 10 mins with Nt BstNBI nicking enzyme (0.3 U/ul final concentration), Bst 2.0 DNA polymerase (0.4 U/ul final concentration), Omniscript reverse transcriptase (0.2 U/ul final concentration), dNTPs (0.5 mM final concentration), forward primer (0.5 μM final concentration), and reverse primer (1 μM final concentration) as previously described, then 2 μL of the NEAR reaction was spiked into a solution containing one of the aforementioned Cas complexes and an FQ ssDNA reporter, and DETECTR was run for 30 mins at 37° C. and fluorescence signal indicative of reporter cleavage was monitored.

[1188] Next, one-step HotPot reactions were performed using the Cas 12 variant of SEQ ID NO: 34 and a Cas12 variant having SEQ ID NO:116 (FIG. 219), in which both proteins in unexpectedly showed low signal-to-noise in the combined reaction. The Cas enzymes were pre-complexed with their guide RNAs at 37° C. for 30 mins as described herein before being added directly into the NEAR reaction mix described herein (e.g., with reference to FIG. 218) containing an FQ ssDNA reporter. The one-pot NECTR reaction was incubated for 120 mins at 60° C. and fluorescence signal indicative of reporter cleavage was monitored. This resulted in low signal-to-noise ratios, with significant signal being observed in the NTC (“no template control”) conditions, suggesting that something other than the target was turning on the NECTR reaction. It was hypothesized that the guide RNA may have been used as a template for the primers, thus triggering the NECTR reaction to proceed even when no target was added.

[1189] A NEAR reaction was thus performed using either the normal SARS-CoV-2 RNA template or the guide RNA as a template, with all other conditions the same as described previously with respect to FIG. 218 (FIG. 220). Briefly, the Cas12 variant having SEQ ID NO: 34 was pre-complexed with its guide RNA at 37° C. for 30 mins in the NEAR reaction buffer. For each reaction, NEAR was run at 60° C. for 10 mins (with 500 copies/reaction SARS-CoV-2 target RNA or 40 nM guide RNA being added as the template), then 2 μL of the NEAR reaction product was spiked into a solution containing the Cas complex and an FQ ssDNA reporter The DETECTR reaction was the run for 120 mins at 60° C. and fluorescence signal indicative of reporter cleavage was monitored. The reaction proceeded by the guide just as well as the template under the conditions tested, with both conditions having robust fluorescence, indicating off target amplification of the guide itself was occurring.

[1190] Given that the guide RNA itself could be used to trigger the NEAR reaction, new primer sets were designed around two alternative target sites, R8895 for influenza B virus (IBV) (FIGS. 221A, 222A) and R288 for RSV-A (FIGS. 221B, 222B). The primer sets were optimized for reduced overlap with the guide RNA while still maintaining the desired amplification speed of NEAR through single base pair shifts slightly increasing the length of the amplified region, (FIGS. 222A-222B graphically illustrate the guide/primer overlaps for IBV and RSV-A, respectively). The Cas12 variant of SEQ ID NO: 34 was pre-complexed with its guide RNA (R8895 for IBV or R288 for RSV-A) at 37° C. for 30 mins in NEAR reaction buffer as described herein. For each reaction, NEAR was run at 60° C. for 10 mins with different primer pairs (IBV: forward primers 21, 23, 25, or 27 in combination with reverse primers 22, 24, 26, or 28; RSV-A: forward primers 29, 31, 33, or 35 in combination with reverse primers 30, 32, 34, or 36) and with 500 copies/reaction or 0 copies/reaction (“NTC”) of IBV target RNA or RSV-A target RNA as described herein 2 μL of NEAR reaction product was then spiked into a DETECTR reaction with the Cas12 variant complex and an FQ-ssDNA reporter and incubated for 120 mins at 60° C. while fluorescence signal indicative of reporter cleavage was monitored as described herein.

[1191] Three primer sets (25-24 and 25-26 for IBV, and 31-36 for RSV-A) were chosen for testing in the single-step based NECTR reaction due to their exhibiting high signal-to-noise (as demonstrated in FIGS. 221A-221B) with little guide overlap (as shown in FIGS. 222A-222B). Because NEAR is optimal with a small amplified region, designing primers to not overlap the guide RNA, while still keeping this region small enough for NEAR, can be difficult. Nonetheless, as shown in FIG. 223, the primer set of 25-26 resulted in high signal-to-noise in the HotPot NECTR reaction (which was performed as described with respect to FIG. 219).

[1192] These reactions were next replicated with the addition of TIPP or in the absence of TIPP (FIG. 224). TIPP (thermostable inorganic pyrophosphatase) has previously been shown to help with Mg2+ concentration and enhancing separation between +/−targets (see, e.g., FIG. 164). The results with primer set 25-26 were successfully replicated and it was found that TIPP somewhat improved signal-to-noise over time.

### Example 47: Sample Preparation with Savinase® (Aka Subtilisin 309) to Remove Nucleases Having Endogenous RNase Activity Prior to DETECTR

[1193] This example describes a method of lysing a sample with a protease to release nucleic acids so that they are accessible to a programmable nuclease (e.g., in a DETECTR reaction). This example describes the use of Savinase® (Subtilisin 309) in a universal prep buffer for removing nucleases and thus reducing endogenous RNase activity. Biological samples, including saliva, nasal fluid, sputum, and blood, typically contain endogenous RNase species. Programmable nuclease-based detection assays for RNA viruses on crude sample preps often fail due to the presence of these RNases, which can cause degradation of the naked RNA viral template when it is released from viral particles during sample preparation. As RNases are protein in nature, the use of proteases can remove them, however the high variety of different RNase species in a sample means that few proteases will be able to remove all RNases present in the sample. It may also be beneficial to inhibit native RNase activity, particularly when the sample will be used in a programmable nuclease-based detection reaction, in order to prevent degradation of added nucleases (e.g., CRISPR-Cas enzymes) by the native RNAses. However, such nucleases may themselves be targets of proteases, therefore any protease used for sample preparation should preferably be removed, denatured, or otherwise inactivated before the sample is exposed to programmable nuclease-based detection reagents and conditions (e.g., DETECTR reaction compositions).

[1194] In this example, Savinase®, a serine protease, was tested for activity against the RNases present in fresh saliva samples using an RNase Reporter Assay (described below), and resulted in significantly reduced RNase activity. Savinase® was shown to be inhibited by 10 mM PMSF (phenylmethylsulfonyl fluoride, protease inhibitor). 10 mM PMSF was found to have no significant inhibition of a DETECTR reaction run using CasM.26. De-salted Savinase® successfully reduced saliva RNase levels, so that after treatment, following the addition of PMSF and spike-in of SARS-CoV-2 synthetic RNA, DETECTR was able to produce a positive signal. Without Savinase® treatment, RNase activity in saliva resulted in DETECTR failure.

[1195] Savinase® was purchased from Sigma® (P3111). Savinase® was initially screened alongside other proteases for activity against RNases from fresh saliva (50% v/v) in 10 mM Tris pH8. Saliva was chosen as the test sample. An RNase reporter assay (0.01% v/v Rep132 in 10 mM Tris pH8, incubated at 37° C. for 1 hour on QS5 using Cy5 channel for detection every 25s) was used to test the RNase activity following incubation at 37° C., 55° C., or 65° C. with 5% protease (v/v) for 1 hour. Savinase® showed the lowest RNase activity, with the preferred incubation temperature being 65° C. This was then repeated using 1× MB1 (buffer), 5% v/v protease, incubation at 37° C., 55° C., or 65° C. for 1 hour, and RNase activity measured using the FQ RNA reporter Rep132 (5′-Alex647N/rUrUrUrUrU/IAbRQSp-3′) in MB1. Again, Savinase® showed the lowest RNase activity, with the preferred incubation temperature tested being 65° C.

[1196] Savinase® was then tested against the other proteases which demonstrated some RNase removal at comparable activity concentrations of 3U, where possible. The lot of Savinase® used was documented as having 18U/g and the density of Savinase® at 1.16 g/mL, indicating an activity of 0.02U/uL. 30 μL of Savinase® (corresponding to 0.63U) was used in a 100 μL reaction (50 μL saliva, 20 μL 5× MB1), at 37° C., 55° C., or 65° C. for 1 hour; followed by RNase Reporter Assay (described above). Despite the units of Savinase® used being ˜5-fold less than for many of the other enzymes tested, Savinase® still showed to clearly have the best RNase removal of the proteases tested. The protease inhibitor PMSF was then tested for activity against Savinase® following the incubation at 55° C. and 65° C. for 1 hour; at 0, 0.1 mM, 1 mM, and 10 mM in 50% isopropanol, at room temperature (no incubation time) and Pierce™ Protease Activity assay (Thermo Scientific® 23266), 25° C. for 45 m on QS5 with signal detected using FAM channel, measuring every 25s. 10 mM PMSF was shown to significantly reduce Savinase® activity.

[1197] Further testing of Savinase® alone and in combination with the next most RNase-removing protease (Protamex, Sigma® P0029) was carried out using different ratios of each enzyme combined. Savinase® was confirmed to have significant anti-RNase activity via the RNAse reporter assay described above (FIG. 225). 30 μL of Savinase® (corresponding to 0.63U) was used in a 100 μL reactions (50 μL saliva, 20 μL 5× MB1) for 5, 15, or 30 minutes at 65° C. to determine whether RNAse activity was reduced with treatment with Savinase®. The RNase reporter assay (0.01% v/v Rep132 in 10 mM Tris pH8, incubated at 37° C. for 1 hour on QS5 using Cy5 channel for detection every 25s) was used to test the RNase activity of Savinase®. 100% Savinase was shown to have superior anti-RNase activity over Protamex® via the RNAse reporter assay.

[1198] Savinase® also showed significant reduction in Protease Activity Assay following inhibition with 10 mM PMSF (in 15% isopropanol) after just 1 minute at room temperature; this was reduced further with longer incubation times (5 minutes and 15 minutes) (FIG. 226). The RNAse reporter assay was run as before following treatment of Savinase® with PMSF for the stated time periods. Other protease inhibitors were tested for inhibition of Savinase®, initially at the suggested working concentrations and then at 10× working concentrations, as the working concentration for PMSF is 1 mM, but 10 mM showed increased activity against Savinase®.

[1199] Protease inhibitors (including PMSF) were tested for activity against CasM.26 via a DETECTR reaction with 1.5M cp/rxn Twist SARS-CoV-2 RNA, R4684 guide RNA (5′-GCCACCCCAAAAAUGAAGGGGACUAAAACAAGAAGAAUUCAGAUUUUUAA-3′ (SEQ ID NO: 1517)), (62.5 nM final concentration), reporter Rep132 (100 nM final concentration), and buffer MB1. PMSF was shown not to adversely affect DETECTR (FIG. 227).

[1200] Some commercially-purchased Savinase® was found to be non-compatible with DETECTR, unless in very dilute concentrations. It was hypothesized that salts in the commercially-purchased Savinase® may have a deleterious effect on the DETCTR reaction. To test this, commercially-purchased Savinase® was subjected to desalting to determine whether salt concentration may contribute to reduced activity of the DETECTR reaction. Desalting of Savinase® on PD10 columns was shown to remove calcium from the Savinase® via an Alginate Polymerization Assay.

[1201] FIGS. 228A-228D depict a protease assay comparing commercially supplied Savinase®, 1.4× diluted Savinase® with PD10 cleaned Savinase® eluted in Tris, MB1 or MB3, & different elution buffers alone, all with 50% saliva (other than the No Saliva control), and the Saliva control has no Savinase®. Results show the endogenous protease activity in Saliva. All samples were heated at 65° C. for 5 m followed by no more treatment, the addition of 10 mM PMSF or 95° C. for 15m. Pierce™ Protease Activity assay was used to define protease activity (measured on QS5 at 25° C. for 90 cycles if 25 seconds detection, 5 seconds). De-salted Savinase® retained its proteolytic activity. Both PMSF and heat treatment were sufficient to reduce protease activity of all Savinase® species (as-purchased or following de-salting).

[1202] FIGS. 229A-229D depict the remaining RNase activity following treatment with commercially supplied Savinase®, 1.4× diluted Savinase®, or PD10 cleaned Savinase® eluted in Tris, MB1 or MB3, & different elution buffers alone, all with 50% saliva (other than the No Saliva control), and the Saliva control has no Savinase®. Results show the endogenous protease activity in Saliva. All samples were heated at 65 C for 5 m followed by no more treatment, the addition of 10 mM PMSF or 95° C. for 15m. RNase Reporter assay (Rep132 in MB1) was used to define protease activity (measured on QS5 at 37° C. for 90 cycles if 25s detection, 5s). Desalted Savinase® was able to remove native RNase activity from saliva.

[1203] Desalting resulted in a Savinase® solution which still retained protease activity, was still highly effective at removing RNase activity from saliva, and showed potential compatibility with RNA-based DETECTR. In an exemplary DETECTR reaction, saliva treated with PD10 desalted Savinase® is incubated at 65° C. for 5 minutes, denatured with 10 mM PMSF at room temperatures, spiked with 2M cp/rxn SARS-CoV-2 synthetic RNA (Twist), and then incubated with CasM.26, R4684 guideRNA, reporter Rep132, and MB1 buffer at 37° C. Fluorescence is monitored over time to determine whether reporter is cleaved by the Cas enzyme as described herein.

[1204] While preferred embodiments of the present invention have been shown and described herein, it will be obvious to those skilled in the art that such embodiments are provided by way of example only. Numerous variations, changes, and substitutions will now occur to those skilled in the art without departing from the invention. It should be understood that various alternatives to the embodiments described herein can be employed. It is intended that the following claims define the scope of the invention and that methods and structures within the scope of these claims and their equivalents be covered thereby.

1. A composition for detecting a target nucleic acid, the composition comprising a programmable nuclease, a guide nucleic acid, a first reporter, an enzyme, and a second reporter, wherein:
(a) the guide nucleic acid is configured to bind to the target nucleic acid;
(b) the programmable nuclease is effective to cleave the first reporter in response to formation of a complex comprising the programmable nuclease, the guide nucleic acid, and the target nucleic acid;
(c) the cleavage of the first reporter is effective to separate a first nucleic acid section from a second nucleic acid section thereof;
(d) the first nucleic acid section is effective to activate the enzyme; and
(e) the activated enzyme is effective to cleave the second reporter to produce a detectable product comprising a detection moiety.

2. The composition of claim 1, wherein the enzyme is an endonuclease and the second reporter comprises a polynucleotide substrate of the enzyme.

3. The composition of claim 2, wherein the endonuclease is a NucC endonuclease.

4. The composition of claim 3, wherein the first nucleic acid section comprises adenosine residues.

5. The composition of claim 4, wherein the adenosine residues comprise cyclic adenylate (cA3).

6. The composition of claim 1, wherein the second nucleic acid section comprises RNA residues, optionally wherein the RNA residues comprise a plurality of uracil residues.

7. The composition of claim 1, wherein the second nucleic acid section comprises DNA residues, optionally wherein the DNA residues comprise a plurality of thymine residues.

8. The composition of claim 1, wherein (a) the second reporter comprises a fluorescent label and a quencher, and (b) cleavage of the second reporter by the activated enzyme is effective to separate the fluorescent label from the quencher.

9. A method of detecting a target nucleic acid in a sample, the method comprising:
(a) contacting the sample with the composition of claim 1;
(b) cleaving the first reporter with the programmable nuclease in response to formation of the complex comprising the programmable nuclease, the guide nucleic acid, and the target nucleic acid, thereby releasing the first nucleic acid section;
(c) activating the enzyme with the first nucleic acid section;
(d) cleaving the second reporter with the activated enzyme, thereby producing the detectable product comprising the detection moiety; and
(e) detecting the detection moiety, thereby detecting the presence of the target nucleic acid in the sample.

10. The method of claim 9, wherein (a) the second reporter comprises a polynucleotide substrate of the enzyme, and (b) the enzyme is a NucC.

11. The method of claim 10, wherein step (d) is performed at a temperature of at least 40° C.

12. A device for detecting a target nucleic acid, the device comprising:
a sample interface configured to receive a sample;
a first sample chamber in fluid communication with the sample interface and configured to hold a first predetermined volume of the sample;
a first reaction chamber in fluid communication with the first sample chamber and comprising a first set of amplification reagents and a first set of detection reagents, wherein the first set of amplification reagents are configured to amplify a first target nucleic acid, wherein the first set of detection reagents comprises a first programmable nuclease, a first guide nucleic acid configured to bind to the first target nucleic acid, and a first reporter configured to release a first detection moiety when cleaved by the first programmable nuclease following binding of the first guide nucleic acid to the first target nucleic acid;
a first valve disposed between the first sample chamber and the first reaction chamber and configured to regulate flow therebetween;
a first lateral flow assay strip configured to be inserted into the first reaction chamber and capture the first detection moiety when released and thereby detect a presence or absence of the first target nucleic acid in the sample;
a second sample chamber in fluid communication with the sample interface and configured to hold a second predetermined volume of the sample;
a second reaction chamber in fluid communication with the second sample chamber and comprising a second set of amplification reagents and a second set of detection reagents, wherein the second set of amplification reagents are configured to amplify a second target nucleic acid, wherein the second set of detection reagents comprises a second programmable nuclease, a second guide nucleic acid configured to bind to the second target nucleic acid, and a second reporter configured to release a second detection moiety when cleaved by the second programmable nuclease following binding of the second guide nucleic acid to the second target nucleic acid;
a second valve disposed between the second sample chamber and second first reaction chamber and configured to regulate flow therebetween; and
a second lateral flow assay strip configured to be inserted into the second reaction chamber and capture the second detection moiety when released and thereby detect a presence or absence of the second target nucleic acid in the sample,
wherein the first and second reaction chambers are fluidly independent of one another.

13. A method for detecting a plurality of target nucleic acids, the method comprising:
applying the sample to the sample interface of the device of claim 12;
transferring the first predetermined volume of the sample into the first sample chamber;
transferring the second predetermined volume of the sample into the second sample chamber;
transferring the first predetermined volume from the first sample chamber to the first reaction chamber;
transferring the second predetermined volume from the second sample chamber to the second reaction chamber;
amplifying the first target nucleic acid in the first reaction chamber;
amplifying the second target nucleic acid in the second reaction chamber;
binding the first target nucleic acid with the first guide nucleic acid, thereby cleaving the first detection moiety from the first reporter in the first reaction chamber;
binding the second target nucleic acid with the second guide nucleic acid, thereby cleaving the second detection moiety from the second reporter in the second reaction chamber;
inserting the first lateral flow assay strip into the first reaction chamber;
inserting the second lateral flow assay strip into the second reaction chamber;
capturing the first detection moiety with the first lateral flow assay strip, thereby detecting the presence of the first target nucleic acid; and
capturing the second detection moiety with the second lateral flow assay strip, thereby detecting the presence of the second target nucleic acid.

14. A device for detecting a target nucleic acid, the device comprising:
a sample interface configured to receive a sample;
a first reaction chamber in fluid communication with the sample interface and comprising a first set of amplification reagents and a first set of detection reagents, wherein the first set of amplification reagents are configured to amplify a first target nucleic acid, wherein the first set of detection reagents comprises a first programmable nuclease, a first guide nucleic acid configured to bind to the first target nucleic acid, and a first reporter configured to release a first detection moiety when cleaved by the first programmable nuclease following binding of the first guide nucleic acid to the first target nucleic acid;
a first lateral flow assay strip in fluid communication with the first reaction chamber and configured to capture the first detection moiety when released and thereby detect a presence or absence of the first target nucleic acid in the sample;
a second reaction chamber in fluid communication with the sample interface and comprising a second set of amplification reagents and a second set of detection reagents, wherein the second set of amplification reagents are configured to amplify a second target nucleic acid, wherein the second set of detection reagents comprises a second programmable nuclease, a second guide nucleic acid configured to bind to the second target nucleic acid, and a second reporter configured to release a second detection moiety when cleaved by the second programmable nuclease following binding of the second guide nucleic acid to the second target nucleic acid; and
a second lateral flow assay strip in fluid communication with the second reaction chamber and configured to capture the second detection moiety when released and thereby detect a presence or absence of the second target nucleic acid in the sample,
wherein the first and second reaction chambers are fluidly independent of one another.

15. (canceled)

16. (canceled)

17. A device for detecting a target nucleic acid, comprising:
a sample interface configured to receive a sample;
a reaction chamber in fluid communication with the sample interface, wherein the reaction chamber comprises a plurality of reporters and thermostable inorganic pyrophosphatase;
a programmable nuclease and a guide nucleic acid disposed within the reaction chamber, the guide nucleic acid being configured to bind to a target nucleic acid;
wherein each of the plurality of reporters is configured to release a detection moiety when cleaved by the programmable nuclease following binding of the guide nucleic acid to the target nucleic acid, and
wherein release of the detection moiety is indicative of a presence or absence of the target nucleic acid.

18. A device for detecting a target nucleic acid, comprising:
a sample interface configured to receive a sample;
a first reaction chamber in fluid communication with the sample interface, wherein the first reaction chamber comprises amplification reagents configured to amplify the sample, said amplification reagents comprising a forward primer, a reverse primer, dNTPs, a DNA polymerase, and a nicking endonuclease;
a second reaction chamber in fluid communication with the first reaction chamber, wherein the second reaction chamber comprises a plurality of reporters;
a programmable nuclease and a guide nucleic acid disposed within the second reaction chamber, the guide nucleic acid being configured to bind to a target nucleic acid;
wherein each of the plurality of reporters is configured to release a detection moiety when cleaved by the programmable nuclease following binding of the guide nucleic acid to the target nucleic acid, and
wherein release of the detection moiety is indicative of a presence or absence of the target nucleic acid in the sample.

19.-71. (canceled)

72. A composition for detecting a target nucleic acid in a reaction chamber, the composition comprising a programmable nuclease, a guide nucleic acid, a forward primer, a reverse primer, a polymerase, a nicking endonuclease, and a reporter, wherein:
(a) the guide nucleic acid is configured to bind to the target nucleic acid;
(b) the forward primer comprises (i) a 5′ portion comprising a first hairpin, and (ii) a 3′ portion that is configured to bind the target nucleic acid at a first overlapping region with respect to the guide nucleic acid;
(c) the reverse primer comprises (i) a 5′ portion comprising a second hairpin, and (ii) a 3′ portion that is configured to bind a complement of the target nucleic acid at a second overlapping region with respect to the guide nucleic acid;
(d) the first and second hairpins are cleavage substrates for the nicking endonuclease;
(e) the programmable nuclease is effective to cleave the reporter in response to formation of a complex comprising the programmable nuclease, the guide nucleic acid, and (i) the target nucleic acid or (ii) an amplicon of the target nucleic acid; and
(f) the cleavage of the reporter is effective to produce a detectable product comprising a detection moiety.

73. The composition of claim 72, wherein (a) the sequence of the target nucleic acid to which the 3′ portion of the first primer is configured to bind defines a first sequence of the target nucleic acid; (b) the sequence of the 3′ portion of the reverse primer defines a second sequence of the target nucleic acid; and (c) the first sequence and second sequence are separated by about 5 to about 10 nucleotides along the target nucleic acid.

74. The composition of claim 72, wherein the 3′ portions of the forward primer and reverse primer are about 16 to about 20 nucleotides in length.

75. The composition of claim 72, wherein overlap between the 3′ portion of the reverse primer and the sequence to which the guide nucleic acid is configured to bind overlap by 1 to 5 nucleotides, 2 to 5 nucleotides, or 3 nucleotides.

76. The composition of claim 72, wherein the first hairpin and/or the second hairpin are 10 to 20 nucleotides in length, 16 to 20 nucleotides in length, or 16 nucleotides in length.

77. The composition of claim 72, wherein the programmable nuclease is a Cas protein, optionally wherein the Cas protein is a Cas 12 protein or a Cas14 protein.

78. A method of detecting a target nucleic acid in a sample, the method comprising:
(a) contacting the sample with the composition of claim 72;
(b) performing nicking enzyme amplification reaction (NEAR) reaction to amplify the target nucleic acid;
(c) forming a complex comprising the programmable nuclease, the guide nucleic acid, and (i) the target nucleic acid, or (ii) an amplicon of the target nucleic acid;
(d) cleaving the reporter with the programmable nuclease activated by formation of the complex, thereby producing the detectable cleavage product; and
(e) detecting the detection moiety, thereby detecting the presence of the target nucleic acid in the sample.

79. The method of claim 78, wherein steps (b) through (d) are performed at about the same temperature.

The application's sequence listing, which the Patent Office published only in electronic form, follows.

SEQUENCE LISTING (1546 sequences)

SEQ ID NO: 1 - protein, 1307 aa, synthetic construct
  REGION 1..1307: note = Description of Artificial Sequence: Synthetic polypeptide
MADLSQFTHKYQVPKTLRFELIPQGKTLENLSAYGMVADDKQRSENYKKLKPVIDRIYKYFIEESLKNTNLDWNPLYEAIREYRKEKTTATITNLKEQQDICRRAIASRFEGKVPDKGDKSVKDFNKKQSKLFKELFGKELFTDSVLEQLPGVSLSDEDKALLKSFDKFTTYFVGFYDNRKNVFSSDDISTGIPHRLVQENFPKFIDNCDDYKRLVLVAPELKEKLEKAAEATKIFEDVSLDEIFSIKFYNRLLQQNQIDQFNQLLGGIAGAPGTPKIQGLNETLNLSMQQDKTLEQKLKSVPHRFSPLYKQILSDRSSLSFIPESFSCDAEVLLAVQEYLDNLKTEHVIEDLKEVFNRLTTLDLKHIYVNSTKVTAFSQALFGDWNLCREQLRVYKMSNGNEKITKKALGELESWLKNSDIAFTELQEALADEALPAKVNLKVQEAISGLNEQMAKSLPKELKIPEEKEELKALLDAIQEVYHTLEWFIVSDDVETDTDFYVPLKETLQIIQPIIPLYNKVRNFATQKPYSVEKFKLNFANPTLADGWDENKEQQNCAVLFQKGNNYYLGILNPKNKPDFDNVDTEKQGNCYQKMVYKQFPDFSKMMPKCTTQLKEVKQHFEGKDSDYILNNKNFIKPLTITREVYDLNNVLYDGKKKFQIDYLRKTKDEDGYYTALHTWIDFAKKFVASYKSTSIYDTSTILPPEKYEKLNEFYGALDNLFYQIKFENIPEEIIDTYVEDGKLFLFQIYNKDFAAGATGAPNLHTIYWKAVFDPENVKDVVVKLNGQAELFYRPKSNMDVIRHKVGEKLVNRTLKDGSILTDELHKELYLYANGSLKKGLSEDAKIILDKNLAVIYDVHHEIVKDRRFTTDKFFFHVPLTLNYKCDKNPVKFNAEVQEYLKENPDTYVIGIDRGERNLIYAVVIDPKGRIVEQKSFNVINGFDYHGKLDQREKERVKARQAWTAVGKIKELKQGYLSLVVHEISKMMVRYQAVVVLENLNVGFKRVRSGIAEKAVYQQFEKMLINKLNYLMFKDAGGTEPGSVLNAYQLTDRFESFAKMGLQTGFLFYIPAAFTSKIDPATGFVDPFRWGAIKTLADKREFLSGFESLKFDSTTGNFILHFDVSKNKNFQKKLEGFVPDWDIIIEANKMKTGKGATYIAGKRIEFVRDNNSQGHYEDYLPCNALAETLRQCDIPYEEGKDILPLILEKNDSKLLHSVFKVVRLTLQMRNSNAETGEDYISSPVEDVSGSCFDSRMENEKLPKDADANGAYHIALKGMLALERLRKDEKMAISNNDWLNYIQEKRA

SEQ ID NO: 2 - protein, 492 aa, synthetic construct
  REGION 1..492: note = Description of Artificial Sequence: Synthetic polypeptide
MAGKKKDKDVINKTLSVRIIRPRYSDDIEKEISDEKAKRKQDGKTGELDRAFFSELKSRNPDIITNDELFPLFTEIQKNLTEIYNKSISLLYMKLIVEEEGGSTASALSAGPYKECKARFNSYISLGLRQKIQSNFRRKELKGFQVSLPTAKSDRFPIPFCHQVENGKGGFKVYETGDDFIFEVPLIKYTATNKKSTSGKNYTKVQLNNPPVPMNVPLLLSTMRRRQTKKGMQWNKDEGTNAELRRVMSGEYKVSYAEIIRRTRFGKHDDWFVNFSIKFKNKTDELNQNVRGGIDIGVSNPLVCAVTNGLDRYIVANNDIMAFNERAMARRRTLLRKNRFKRSGHGAKNKLEPITVLTEKNERFRKSILQRWAREVAEFFKRTSASVVNMEDLSGITEREDFFSTKLRTTWNYRLMQTTIENKLKEYGIAVNYISPKYTSQTCHSCGKRNDYFTFSYRSENNYPPFECKECNKVKCNADFNAAKNIALKVVL

SEQ ID NO: 3 - protein, 529 aa, synthetic construct
  REGION 1..529: note = Description of Artificial Sequence: Synthetic polypeptide
MAKNTITKTLKLRIVRPYNSAEVEKIVADEKNNREKIALEKNKDKVKEACSKHLKVAAYCTTQVERNACLFCKARKLDDKFYQKLRGQFPDAVFWQEISEIFRQLQKQAAEIYNQSLIELYYEIFIKGKGIANASSVEHYLSDVCYTRAAELFKNAAIASGLRSKIKSNFRLKELKNMKSGLPTTKSDNFPIPLVKQKGGQYTGFEISNHNSDFIIKIPFGRWQVKKEIDKYRPWEKFDFEQVQKSPKPISLLLSTQRRKRNKGWSKDEGTEAEIKKVMNGDYQTSYIEVKRGSKIGEKSAWMLNLSIDVPKIDKGVDPSIIGGIDVGVKSPLVCAINNAFSRYSISDNDLFHFNKKMFARRRILLKKNRHKRAGHGAKNKLKPITILTEKSERFRKKLIERWACEIADFFIKNKVGTVQMENLESMKRKEDSYFNIRLRGFWPYAEMQNKIEFKLKQYGIEIRKVAPNNTSKTCSKCGHLNNYFNFEYRKKNKFPHFKCEKCNFKENADYNAALNISNPKLKSTKEEP

SEQ ID NO: 4 - protein, 1297 aa, synthetic construct
  REGION 1..1297: note = Description of Artificial Sequence: Synthetic polypeptide
MATLVSFTKQYQVQKTLRFELIPQGKTQANIDAKGFINDDLKRDENYMKVKGVIDELHKNFIEQTLVNVDYDWRSLATAIKNYRKDRSDTNKKNLEKTQEAARKEIIAWFEGKRGNSAFKNNQKSFYGKLFKKELFSEILRSDDLEYDEETQDAIACFDKFTTYFVGFHENRKNMYSTEAKSTSVAYRVVNENFSKFLSNCEAFSVLEAVCPNVLVEAEQELHLHKAFSDLKLSDVFKVEAYNKYLSQTGIDYYNQIIGGISSAEGVRKIRGVNEVVNNAIQQNDELKVALRNKQFTMVQLFKQILSDRSTLSFVSEQFTSDQEVITVVKQFNDDIVNNKVLAVVKTLFENFNSYDLEKIYINSKELASVSNALLKDWSKIRNAVLENKIIELGANPPKTKISAVEKEVKNKDFSIAELASYNDKYLDKEGNDKEICSIANVVLEAVGALEIMLAESLPADLKTLENKNKVKGILDAYENLLHLLNYFKVSAVNDVDLAFYGAFEKVYVDISGVMPLYNKVRNYATKKPYSVEKFKLNFAMPTLADGWDKNKERDNGSIILLKDGQYYLGVMNPQNKPVIDNAVCNDAKGYQKMVYKMFPEISKMVTKCSTQLNAVKAHFEDNTNDFVLDDTDKFISDLTITKEIYDLNNVLYDGKKKFQIDYLRNTGDFAGYHKALETWIDFVKEFLSKYRSTAIYDLTTLLPTNYYEKLDVFYSDVNNLCYKIDYENISVEQVNEWVEEGNLYLFKIYNKDFATGSTGKPNLHTMYWNAVFAEENLHDVVVKLNGGAELFYRPKSNMPKVEHRVGEKLVNRKNVNGEPIADSVHKEIYAYANGKISKSELSENAQEELPLAIIKDVKHNITKDKRYLSDKYFFHVPITLNYKANGNPSAFNTKVQAFLKNNPDVNIIGIDRGERNLLYVVVIDQQGNIIDKKQVSYNKVNGYDYYEKLNQREKERIEARQSWGAVGKIKELKEGYLSLVVREIADMMVKYNAIVVMENLNAGFKRVRGGIAEKAVYQKFEKMLIDKLNYLVFKDVEAKEAGGVLNAYQLTDKFDSFEKMGNQSGFLFYVPAAYTSKIDPVTGFANVFSTKHITNTEAKKEFICSFNSLRYDEAKDKFVLECDLNKFKIVANSHIKNWKFIIGGKRIVYNSKNKTYMEKYPCEDLKATLNASGIDFSSSEIINLLKNVPANREYGKLFDETYWAIMNTLQMRNSNALTGEDYIISAVADDNEKVFDSRTCGAELPKDADANGAYHIALKGLYLLQRIDISEEGEKVDLSIKNEEWFKFVQQKEYAR

SEQ ID NO: 5 - protein, 1145 aa, synthetic construct
  REGION 1..1145: note = Description of Artificial Sequence: Synthetic polypeptide
MCMKITKIDGISHKKYKEKGKLIKNNDTAKDIIEERFNDIEKKTKELFQKTLDFYVKNYEKCKEQNKERREKAKNYFSKVKILVDNKKITICNENTEKMEIEDFNEYDVRSGKYFNVLNKILNGENYTEEDLEVFENDLQKRTGRIKSIKNSLEENKAHFKKESINNNIIYDRVKGNNKKSLFYEYYRISSKHQEYVNNIFEAFDKLYSNSHEAMNNLFSEITKDSKDRNIRKIREAYHEILNKNKTEFGEELYKKIQDNRNNFDKLLEIEPEIKELTKSQIFYKYYIDKVNLDETSIKHCFCHLVEIEVNQLLKNYVYSKRNINKEKLENIFEYCKLKNLIKNKLVNKLNNYIRNCGKYNAYISNNDVVVNSEKISEIRTKEAFLRSIIGVSSSAYFSLRNILNTDNTQDITNKVDKEVDKLYQENKKIELEERLKLFFGNYFDINNQQEIKVFLMNIDKIISSIRHEIIHFKMETNAQNIFDFNNVNLGNTAKNIFSNEINEEKIKFKIFKQLNSANVFDYLSNKDITEYMDKVVFSFTNRNVSFVPSFTKIYNRVQDLANSLEIKKWKIPDKSEGKDAQIYLLKNIYYGKFLDEFLNEENGIFISIKDKIIELNRNQNKRTGFYKLEKFEKIEETNPKKYLEIIQSLYMINIEEIDSEGKNIFLDFIQKIFLKGFFEFIKNNYNYLLELKKIQDKKNIFDSEMSEYIAGEKTLEDIGEINEIIQDIKITEIDKILNQTDKINCFYLLLKLLNYKEITELKGNLEKYQILSKTNVYEKELMLLNIVNLDNNKVKIENFKILAEEIGKFIEKINIEEINKNKKIKTFEELRNFEKGENTGEYYNIYSDDKNIKNIRNLYNIKKYGMLDLLEKISEKTNYCIKKKDLEEYSELRKQLEDEKTNFYKIQEYLHSKYQQKPKKILLKNNKNDYEKYKKSIENIEKYVHLKNKIEFNELNLLQSLLLKILHRLVGFTSIWERDLRFRLIGEFPDELDVEDIFDHRKRYKGTGKGICKKYDRFINTHTEYKNNNKMENVKFADNNPVRNYIAHFNYLPNPKYSILKMMEKLRKLLDYDRKLKNAVMKSIKDILEEYGFKAEFIINSDKEIILNLVKSVEIIHLGKEDLKSRRNSEDLCKLVKAMLEYSK

SEQ ID NO: 6 - protein, 1271 aa, synthetic construct
  REGION 1..1271: note = Description of Artificial Sequence: Synthetic polypeptide
MEDKQFLERYKEFIGLNSLSKTLRNSLIPVGSTLKHIQEYGILEEDSLRAQKREELKGIMDDYYRNYIEMHLRDVHDIDWNELFEALTEVKKNQTDDAKKRLEKIQEKKRKEIYQYLSDDAVFSEMFKEKMISGILPDFIRCNEGYSEEEKEEKLKTVALFHRFTSSFNDFFLNRKNVFTKEAIVTAIGYRVVHENAEIFLENMVAFQNIQKSAESQISIIERKNEHYFMEWKLSHIFTADYYMMLMTQKAIEHYNEMCGVVNQQMREYCQKEKKNWNLYRMKRLHKQILSNASTSFKIPEKYENDAEVYESVNSFLQNVMEKTVMERIAVLKNSTDNFDLSKIYITAPYYEKISNYLCGSWNTITDCLTHYYEQQIAGKGARKDQKVKAAVKADKWKSLSEIEQLLKEYARAEEVKRKPEEYIAEIENIVSLKEAHLLEYHPEVNLIENEKYATEIKDVLDNYMELFHWMKWFYIEEAVEKEVNFYGELDDLYEEIKDIVPLYNKVRNYVTQKPYSDTKIKLNFGTPTLANGWSKSKEYDYNAILLQKDGKYYMGIFNPIQKPEKEIIEGHSQPLEGNEYKKMVYYYLPSANKMLPKVLLSKKGMEIYQPSEYIINGYKERRHIKSEEKFDLQFCHDLIDYFKSGIERNSDWKVFGFDFSDTDTYQDISGFYREVEDQGYKIDWTYIKEADIDRLNEEGKLYLFQIYNKDFSEKSTGRENLHTMYLKNLFSEENVREQVLKLNGEAEIFFRKSSVKKPIIHKKGTMLVNRTYMEEVNGNSVRRNIPEKEYQEIYNYKNHRLKGELSTEAKKYLEKAVCHETKKDIVKDYRYSVDKFFIHLPITINYRASGKETLNSVAQRYIAHQNDMHVIGIDRGERNLIYVSVINMQGEIKEQKSFNIINEFNYKEKLKEREQSRGAARRNWKEIGQIKDLKEGYLSGVIHEIAKMMIKYHAIIAMEDLNYGFKRGRFKVERQVYQKFENMLIQKLNYLVFKDRPADEDGGVLRGYQLAYIPDSVKKMGRQCGMIFYVPAAFTSKIDPTTGFVDIFKHKVYTTEQAKREFILSFDEICYDVERQLFRFTFDYANFVTQNVTLARNNWTIYTNGTRAQKEFGNGRMRDKEDYNPKDKMVELLESEGIEFKSGKNLLPALKKVSNAKVFEELQKIVRFTVQLRNSKSEENDVDYDHVISPVLNEEGNFFDSSKYKNKEEKKESLLPVDADANGAYCIALKGLYIMQAIQKNWSEEKALSPDVLRLNNNDWFDYIQNKRYR

SEQ ID NO: 7 - protein, 1229 aa, synthetic construct
  REGION 1..1229: note = Description of Artificial Sequence: Synthetic polypeptide
MEEKKMSKIEKFIGKYKISKTLRFRAVPVGKTQDNIEKKGILEKDKKRSEDYEKVKAYLDSLHRDFIENTLKKVKLNELNEYACLFFSGTKDDGDKKKMEKLEEKMRKTISNEFCNDEMYKKIFSEKILSENNEEDVSDIVSSYKGFFTSLNGYVNNRKNLYVSDAKPTSIAYRCINENLPKFLRNVECYKKVVQVIPKEQIEYMSNNLNLSPYRIEDCFNIDFFEFCLSQGGIDLYNTFIGGYSKKDGTKVQGINEIVNLYNQKNKKDKEKYKLPQFTPLFKQILSDRDTKSFSIEKLENIYEVVELVKKSYSDEMFDDIETVFSNLNYYDASGIYVKNGPAITHISMNLTKDWATIRNNWNYEYDEKHSTKKNKNIEKYEDTRNTMYKKIDSFTLEYISRLVGKDIDELVKYFENEVANFVMDIKKTYSKLTPLFDRCQKENFDISEDEVNDIKGYLDNVKLLESFMKSFTINGKENNIDYVFYGKFTDDYDKLHEFDHIYNKVRNYITTSRKPYKLDKYKLYFDNPQLLGGWDINKEKDYRTVMLTKDGKYYFAIIDKGEHPFDNIPKDYFDNNGYYKKIIYRQIPNAAKYLSSKQIVPQNPPEEVKRILDKKKADSKSLTEEEKNIFIDYIKSDFLKNYKLLFDKNNNPYFNFAFRESSTYESLNEFFEDVERQAYSVRYENLPADYIDNLVNEGKIYLFEIYSKDFSEYSKGTNNLHTMYFKALFDNDNLKNTVFKLSGNAELFIRPASIKKDELVIHPKNQLLQNKNPLNPKKQSIFDYDLVKDKRFFENQYMLHISIEINKNERDAKKIKNINEMVRKELKDSDDNYIIGIDRGERNLLYVCVINSAGKIVEQMSLNEIINEYNGIKHTVDYQGLLDKCEKERNAQRQSWKSIENIKELKDGYISQVVHKLCQLVEKYDAIIAMENLNGGFKRGRTKFEKQVYQKFENKLINKMEYMADKKRKTTENGGILRGYQLTNGCINNSYQNGFIFYVPAWLTSKIDPTTGFVDLLKPKYTNVEEAHLWINKFNSITYDKKLDMFAFNINYSQFPRADIDYRKIWTFYTNGYRIETFRNSEKNNEFDWKEVHLTSVIKKLLEEYQINYISGKNIIDDLIQIKDKPFWNSFIKYIRLTLQMRNSITGRTDVDYIISPVINNEGTFYDSRKDLDEITLPQDADANGAYNIARKALWIIEKLKESPDEELNKVKLAITQREWLEYAQINI

SEQ ID NO: 8 - protein, 835 aa, synthetic construct
  REGION 1..835: note = Description of Artificial Sequence: Synthetic polypeptide
MEKIKKPSNRNSIPSIIISDYDANKIKEIKVKYLKLARLDKITIQDMEIVDNIVEFKKILLNGVEHTIIDNQKIEFDNYEITGCIKPSNKRRDGRISQAKYVVTITDKYLRENEKEKRFKSTERELPNNTLLSRYKQISGFDTLTSKDIYKIKRYIDFKNEMLFYFQFIEEFFNPLLPKGKNFYDLNIEQNKDKVAKFIVYRLNDDFKNKSLNSYITDTCMIINDFKKIQKILSDFRHALAHFDFDFIQKFFDDQLDKNKFDINTISLIETLLDQKEEKNYQEKNNYIDDNDILTIFDEKGSKFSKLHNFYTKISQKKPAFNKLINSFLSQDGVPNEEFKSYLVTKKLDFFEDIHSNKEYKKIYIQHKNLVIKKQKEESQEKPDGQKLKNYNDELQKLKDEMNTITKQNSLNRLEVKLRLAFGFIANEYNYNFKNFNDEFTNDVKNEQKIKAFKNSSNEKLKEYFESTFIEKRFFHFSVNFFNKKTKKEETKQKNIFNSIENETLEELVKESPLLQIITLLYLFIPRELQGEFVGFILKIYHHTKNITSDTKEDEISIEDAQNSFSLKFKILAKNLRGLQLFHYSLSHNTLYNNKQCFFYEKGNRWQSVYKSFQISHNQDEFDIHLVIPVIKYYINLNKLMGDFEIYALLKYADKNSITVKLSDITSRDDLKYNGHYNFATLLFKTFGIDTNYKQNKVSIQNIKKTRNNLAHQNIENMLKAFENSEIFAQREEIVNYLQTEHRMQEVLHYNPINDFTMKTVQYLKSLSVHSQKEGKIADIHKKESLVPNDYYLIYKLKAIELLKQKVIEVIGESEDEKKIKNAIAKEEQIKKGNN

SEQ ID NO: 9 - protein, 1264 aa, synthetic construct
  REGION 1..1264: note = Description of Artificial Sequence: Synthetic polypeptide
MENYGGFTGLYPLQKTLKFELRPQGRTMEHLVSSNFFEEDRDRAEKYKIVKKVIDNYHKDFINECLSKRSFDWTPLMKTSEKYYASKEKNGKKKQDLDQKIIPTIENLSEKDRKELELEQKRMRKEIVSVFKEDKRFKYLFSEKLFSILLKDEDYSKEKLTEKEILALKSFNKFSGYFIGLHKNRANFYSEGDESTAIAYRIVNENFPKFLSNLKKYREVCEKYPEIIQDAEQSLAGLNIKMDDIFPMENFNKVMTQDGIDLYNLAIGGKAQALGEKQKGLNEFLNEVNQSYKKGNDRIRMTPLFKQILSERTSYSYILDAFDDNSQLITSINGFFTEVEKDKEGNTFDRAVGLIASYMKYDLSRVYIRKADLNKVSMEIFGSWERLGGLLRIFKSELYGDVNAEKTSKKVDKWLNSGEFSLSDVINAIAGSKSAETFDEYILKMRVARGEIDNALEKIKCINGNFSEDENSKMIIKAILDSVQRLFHLFSSFQVRADFSQDGDFYAEYNEIYEKLFAIVPLYNRVRNYLTKNNLSMKKIKLNFKNPALANGWDLNKEYDNTAVIFLREGKYYLGIMNPSKKKNIKFEEGSGTGPFYKKMAYKLLPDPNKMLPKVFFAKKNINYYNPSDEIVKGYKAGKYKKGENFDIDFCHKLIDFFKESIQKNEDWRAFNYLFSATESYKDISDFYSEVEDQGYRMYFLNVPVANIDEYVEKGDLFLFQIYNKDFASGAKGNKDMHTIYWNAAFSDENLRNVVVKLNGEAELFYRDKSIIEPICHKKGEMLVNRTCFDKTPVPDKIHKELFDYHNGRAKTLSIEAKGYLDRVGVFQASYEIIKDRRYSENKMYFHVPLKLNFKADGKKNLNKMVIEKFLSDKDVHIIGIDRGERNLLYYSVIDRRGNIIDQDSLNIIDGFDYQKKLGQREIERREARQSWNSIGKIKDLKEGYLSKAVHKVSKMVLEYNAIVVLEDLNFGFKRGRFKVEKQVYQKFEKMLIDKLNYLVFKEVLDSRDAGGVLNAYQLTTQLESFNKLGKQSGILFYVPAAYTSKIDPTTGFVSLFNTSRIESDSEKKDFLSGFDSIVYSAKDGGIFAFKFDYRNRNFQREKTDHKNIWTVYTNGDRIKYKGRMKGYEITSPTKRIKDVLSSSGIRYDDGQELRDSIIQSGNKVLINEVYNSFIDTLQMRNSDGEQDYIISPVKNRNGEFFRTDPDRRELPVDADANGAYHIALRGELLMQKIAEDFDPKSDKFTMPKMEHKDWFEFMQTRGD

SEQ ID NO: 10 - protein, 500 aa, synthetic construct
  REGION 1..500: note = Description of Artificial Sequence: Synthetic polypeptide
MEVQKTVMKTLSLRILRPLYSQEIEKEIKEEKERRKQAGGTGELDGGFYKKLEKKHSEMFSFDRLNLLLNQLQREIAKVYNHAISELYIATIAQGNKSNKHYISSIVYNRAYGYFYNAYIALGICSKVEANFRSNELLTQQSALPTAKSDNFPIVLHKQKGAEGEDGGFRISTEGSDLIFEIPIPFYEYNGENRKEPYKWVKKGGQKPVLKLILSTFRRQRNKGWAKDEGTDAEIRKVTEGKYQVSQIEINRGKKLGEHQKWFANFSIEQPIYERKPNRSIVGGLDVGIRSPLVCAINNSFSRYSVDSNDVFKFSKQVFAFRRRLLSKNSLKRKGHGAAHKLEPITEMTEKNDKFRKKIIERWAKEVTNFFVKNQVGIVQIEDLSTMKDREDHFFNQYLRGFWPYYQMQTLIENKLKEYGIEVKRVQAKYTSQLCSNPNCRYWNNYFNFEYRKVNKFPKFKCEKCNLEISADYNAARNLSTPDIEKFVAKATKGINLPEK

SEQ ID NO: 11 - protein, 1261 aa, synthetic construct
  REGION 1..1261: note = Description of Artificial Sequence: Synthetic polypeptide
MIIHNCYIGGSFMKKIDSFTNCYSLSKTLRFKLIPIGATQSNFDLNKMLDEDKKRAENYSKAKSIIDKYHRFFIDKVLSSVTENKAFDSFLEDVRAYAELYYRSNKDDSDKASMKTLESKMRKFIALALQSDEGFKDLFGQNLIKKTLPEFLESDTDKEIIAEFDGFSTYFTGFFNNRKNMYSADDQPTAISYRCINDNLPKFLDNVRTFKNSDVASILNDNLKILNEDFDGIYGTSAEDVFNVDYFPFVLSQKGIEAYNSILGGYTNSDGSKIKGLNEYINLYNQKNENIHRIPKMKQLFKQILSERESVSFIPEKFDSDDDVLSSINDYYLERDGGKVLSIEKTVEKIEKLFSAVTDYSTDGIFVKNAAELTAVCSGAFGYWGTVQNAWNNEYDALNGYKETEKYIDKRKKAYKSIESFSLADIQKYADVSESSETNAEVTEWLRNEIKEKCNLAVQGYESSKDLISKPYTESKKLFNNDNAVELIKNALDSVKELENVLRLLLGTGKEESKDENFYGEFLPCYERICEVDSLYDKVRNYMTQKLYKTDKIKLNFQNPQFLGGWDRNKEADYSAVLLRRNSLYYIAIMPSGYKRVFEKIPAPKADETVYEKVIYKLLPGPNKMLPKVFFSKKGIETFNPPKEILEKYELGTHKTGDGFNLDDCHALIDYFKSALDVHSDWSNFGFRFSDTSTYKNIADFYNEVKNQGYKITFCDVPQSYINELVDEGKLYLFQLYNKDFSEHSKGTPNLHTLYFKMLFDERNLENVVFKLNGEAEMFYREASISKDDMIVHPKNQPIKNKNEQNSRKQSTFEYDIVKDRRYTVDQFMLHIPITLNFTANGGTNINNEVRKALKDCDKNYVIGIDRGERNLLYICVVDSEGRIIEQYSLNEIINEYNGNTYSTDYHALLDKKEKERLESRKAWKTVENIKELKEGYISQVVHKICELVEKYDAVIVMEDLNLGFKQGRSGKFEKSVYQKFEKMLIDKLNYFADKKKSPEEIGSVLNAYQLTNAFESFEKMGKQNGFIFYVPAYLTSKIDPTTGFADLLHPSSKQSKESMRDFVGRFDSITFNKTENYFEFELDYNKFPRCNTDYRKKWTVCTYGSRIKTFRNPEKNSEWDNKTVELTPAFMALFEKYSIDVNGDIKAQIMSVDKKDFFVELIGLLRLTLQMRNSETGKVDRDYLISPVKNSEGVFYNSDDYKGIENASLPKDADANGAYNIARKGLWIIEQIKACENDAELNKIRLAISNAEWLEYAQKK

SEQ ID NO: 12 - protein, 478 aa, synthetic construct
  REGION 1..478: note = Description of Artificial Sequence: Synthetic polypeptide
MKDYIRKTLSLRILRPYYGEEIEKEIAAAKKKSQAEGGDGALDNKFWDRLKAEHPEIISSREFYDLLDAIQRETTLYYNRAISKLYHSLIVEREQVSTAKALSAGPYHEFREKFNAYISLGLREKIQSNFRRKELARYQVALPTAKSDTFPIPIYKGFDKNGKGGFKVREIENGDFVIDLPLMAYHRVGGKAGREYIELDRPPAVLNVPVILSTSRRRANKTWFRDEGTDAEIRRVMAGEYKVSWVEILQRKRFGKPYGGWYVNFTIKYQPRDYGLDPKVKGGIDIGLSSPLVCAVTNSLARLTIRDNDLVAFNRKAMARRRTLLRQNRYKRSGHGSANKLKPIEALTEKNELYRKAIMRRWAREAADFFRQHRAATVNMEDLTGIKDREDYFSQMLRCYWNYSQLQTMLENKLKEYGIAVKYIEPKDTSKTCHSCGHVNEYFDFNYRSAHKFPMFKCEKCGVECGADYNAARNIAQA

SEQ ID NO: 13 - protein, 1229 aa, synthetic construct
  REGION 1..1229: note = Description of Artificial Sequence: Synthetic polypeptide
MKEQFINRYPLSKTLRFSLIPVGETENNFNKNLLLKKDKQRAENYEKVKCYIDRFHKEYIESVLSKARIEKVNEYANLYWKSNKDDSDIKAMESLENDMRKQISKQLTSTEIYKKRLFGKELICEDLPSFLTDKDERETVECFRSFTTYFKGFNTNRENMYSSDGKSTAIAYRCINDNLPRFLDNVKSFQKVFDNLSDETITKLNTDLYNIFGRNIEDIFSVDYFEFVLTQSGIEIYNSMIGGYTCSDKTKIQGLNECINLYNQQVAKNEKSKKLPLMKPLYKQILSEKDSVSFIPEKFNSDNEVLHAIDDYYTGHIGDFDLLTELLQSLNTYNANGIFVKSGVAITDISNGAFNSWNVLRSAWNEKYEALHPVTSKTKIDKYIEKQDKIYKAIKSFSLFELQSLGNENGNEITDWYISSINESNSKIKEAYLQAQKLLNSDYEKSYNKRLYKNEKATELVKNLLDAIKEFQKLIKPLNGTGKEENKDELFYGKFTSYYDSIADIDRLYDKVRNYITQKPYSKDKIKLNFDNPQLLGGWDKNKESDYRTVLLHKDGLYYLAVMDKSHSKAFVDAPEITSDDKDYYEKMEYKLLPGPNKMLPKVFFASKNIDTFQPSDRILDIRKRESFKKGATFNKAECHEFIDYFKDSIKKHDDWSQFGFKFSPTESYNDISEFYREISDQGYSVRFNKISKNYIDGLVNNGYIYLFQIYNKDFSKYSKGTPNLHTLYFKMLFDERNLSNVVYKLNGEAEMFYREASIGDKEKITHYANQPIKNKNPDNEKKESVFEYDIVKDKRFTKRQFSLHLPITINFKAHGQEFLNYDVRKAVKYKDDNYVIGIDRGERNLIYISVINSNGEIVEQMSLNEIISDNGHKVDYQKLLDTKEKERDKARKNWTSVENIKELKEGYISQVVHKICELVIKYDAVIAMEDLNFGFKRGRFPVEKQVYQKFENMLISKLNLLIDKKAEPTEDGGLLRAYQLTNKFDGVNKAKQNGIIFYVPAWDTSKIDPATGFVNLLKPKCNTSVPEAKKLFETIDDIKYNANTDMFEFYIDYSKFPRCNSDFKKSWTVCTNSSRILTFRNKEKNNKWDNKQIVLTDEFKSLFNEFGIDYKGNLKDSILSISNADFYRRLIKLLSLTLQMRNSITGSTLPEDDYLISPVANKSGEFYDSRNYKGTNAALPCDADANGAYNIARKALWAINVLKDTPDDMLNKAKLSITNAEWLEYTQK

SEQ ID NO: 14 - protein, 1242 aa, synthetic construct
  REGION 1..1242: note = Description of Artificial Sequence: Synthetic polypeptide
MKEQFVNQYPISKTLRFSLIPIGKTEENFNKNLLLKEDEKKAEEYQKVKGYIDRYHKFFIETALCNINFEGFEEYSLLYYKCSKDDNDLKTMEDIEIKLRKQISKTMTSHKLYKDLFGENMIKTILPNFLDSDEEKNSLEMFRGFYTYFSGFNTNRKNMYTEEAKSTSIAYRCINDNLPKFLDNSKSFEKIKCALNKEELKAKNEEFYEIFQIYATDIFNIDFFNFVLTQPGIDKYNGIIGGYTCSDGTKVQGLNEIINLYNQQIAKDDKSKRLPLLKMLYKQILSDRETVSFIPEKFSSDNEVLESINNYFSKNVSNAIKSLKELFQGFEAYNMNGIFISSGVAITDLSNAVFGDWNAISTAWEKAYFETNPPKKNKSQEKYEEELKANYKKIKSFSLDEIQRLGSIAKSPDSIGSVAEYYKITVTEKIDNITELYDGSKELLNCNYSESYDKKLIKNDTVIEKVKTLLDAVKSLEKLIKPLVGTGKEDKDELFYGTFLPLYTSLSAVDRLYDKVRNYATQKPYSKDKIKLNFNCSSFLSGWATDYSSNGGLIFEKDGLYYLGIVNKKFTTEEIDYLQQNADENPAQRIVYDFQKPDNKNTPRLFIRSKGTNYSPSVKEYNLPVEEIVELYDKRYFTTEYRNKNPELYKASLVKLIDYFKLGFTRHESYRHYDFKWKKSEEYNDISEFYKDVEISCYSLKQEKINYNTLLNFVAENRIYLFQIYNKDFSKYSKGTPNLHTRYFKALFDENNLSDVVFKLNGGSEMFFRKASIKDNEKVVHPANQPIDNKNPDNSKKQSTFDYELIKDKRFTKHQFSIHIPITMNFKARGRDFINNDIRKAIKSEYKPYVIGIDRGERNLIYISVINNNGEIVEQMSLNDIISDNGYKVDYQRLLDRKEKERDNARKSWGTIENIKELKEGYISQVIHKICELVIKYDAVIAMEDLNFGFKRGRFNVEKQVYQKFENMLISKLNYLCDKKSEANSEGGLLKAYQLTNKFDGVNKGKQNGIIFYVPAWLTSKIDPVTGFVDLLHPKYISVEETHSLFEKLDDIRYNFEKDMFEFDIDYSKLPKCNADFKQKWTVCTNADRIMTFRNSEKNNEWDNKRILLSDEFKRLFEEFGIDYCHNLKNKILSISNKDFCYRFIKLFALTMQMRNSITGSTNPEDDYLISPVRDENGVFYDSRNFIGSKAGLPIDADANGAYNIARKGLWAINAIKSTADDMLDKVDLSISNAKWLEYVQK

SEQ ID NO: 15 - protein, 1168 aa, synthetic construct
  REGION 1..1168: note = Description of Artificial Sequence: Synthetic polypeptide
MKITKIDGILHKKYIKEGKLVKSTSEENKTDERLSELLTIRLDTYIKNPDNASEEENRIRRETLKEFFSNKVLYLKDSILYLKDRREKNQLQNKNYSEEDISEYDLKNKNSFLVLKKILLNEDINSEELEIFRNDFEKKLDKINSLKYSLEENKANYQKINENNIKKVEGKSKRNIFYNYYKDSAKRNDYINNIQEAFDKLYKKEDIENLFFLIENSKKHEKYKIRECYHKIIGRKNDKENFATIIYEEIQNVNNMKELIEKVPNVSELKKSQVFYKYYLNKEKLNDENIKYVFCHFVEIEMSKLLKNYVYKKPSNISNDKVKRIFEYQSLKKLIENKLLNKLDTYVRNCGKYSFYLQDGEIATSDFIVGNRQNEAFLRNIIGVSSTAYFSLRNILETENENDITGRIKGKTVKNKKGEEKYISGEIDKLYDNNKQNEVKKNLKMFYSYDFNMNRKKEIEDFFSNIDEAISSIRHGIVHFNLELEGKDIFTFKNIVPSQISKKMFQNEINEKKLKLKIFRQLNSANVFRYLEKYKILNYLNRTRFEFVNKNIPFVPSFTKLYSRIDDLKNSLCIYWKIPKANDNNKTKEITDAQIYLLKNIYYGEFLNYFMSNNGNFFEIIKEIIELNKNDKRNLKTGFYKLQKFENLQEKTPKEYLANIQSFYMIDAGNKDEEEKDAYIDFIQKIFLKGFMTYLANNGRLSLMYIGNDEQINTSLAGKKQEFDKFLKKYEQNNNIEIPHEINEFVREIKLGKILKYTESLNMFYLILKLLNHKELTNLKGSLEKYQSANKEEAFSDQLELINLLNLDNNRVTEDFELEADEIGKFLDFNGNKVKDNKELKKFDTNKIYFDGENIIKHRAFYNIKKYGILNLLEKISDEAKYKISIEELKNYSNKKIEIEKNHTTQENLHRKYARPRKDEKFNDEDYKKYEKTIRNIQQYTHLKNKVEFNELNLLQSLLLRILHRLVGYTSIWERDLRFRLKGEFPENQYIEEIFNFDNSKNVKYKNGQIVEKYISFYKELYKDDMEKISIYSDKKVKELKKEKKDLYIRNYIAHFNYIPNAEVSLLEVLENLRKLLSYDRKLKNAIMKSIVDILKEYGFVVTFKIEKDKKIRIESLKSEEVVHLKKLKLKDNDKKKEPIKTYRNSKELCKLVKVMFEYKMKEKKSEN

SEQ ID NO: 16 - protein, 1168 aa, synthetic construct
  REGION 1..1168: note = Description of Artificial Sequence: Synthetic polypeptide
MKITKIDGISHKKYIKEGKLVKSTSEENKTDERLSELLTIRLDTYIKNPDNASEEENRIRRENLKEFFSNKVLYLKDGILYLKDRREKNQLQNKNYSEEDISEYDLKNKNSFLVLKKILLNEDINSEELEIFRKDVEAKLNKINSLKYSFEENKANYQKINENNVEKVGGKSKRNIIYDYYRESAKRNDYINNVQEAFDKLYKKEDIEKLFFLIENSKKHEKYKIRECYHKIIGRKNDKENFAKIIYEEIQNVNNIKELIEKVPDMSELKKSQVFYKYYLDKEELNDKNIKYAFCHFVEIEMSQLLKNYVYKRLSNISNDKIKRIFEYQNLKKLIENKLLNKLDTYVRNCGKYNYYLQDGEIATSDFIAGNRQNEAFLRNIIGVSSVAYFSLRNILETENKDDITGKMRGKTRIDSKTGEEKYIPGEVDQIYYENKQNEVKNKLKMFYGYDFDMDNKKEIEDFFANIDEAISSIRHGIVHFNLDLDGKDIFAFKNIVPSEISKKMFQNEINEKKLKLKIFRQLNSANVFRYLEKYKILNYLKRTRFEFVNKNIPFVPSFTKLYSRIDDLKNSLGIYWKTPKTNDDNKTKEIIDAQIYLLKNIYYGEFLNYFMSNNGNFFEISREIIELNKNDKRNLKTGFYKLQKFEDIQEKTPKKYLANIQSLYMINAGNQDEEEKDTYIDFIQKIFLKGFMTYLANNGRLSLMYIGNDEQINTSLAGKKQEFDKFLKKYEQNNNIEIPHEINEFLREIKLGKILKYTESLNMFYLILKLLNHKELTNLKGSLEKYQSANKEETFSDELELINLLNLDNNRVTEDFELEANEIGKFLDFNGNKIKDRKELKKFDTKKIYFDGENIIKHRAFYNIKKYGMLNLLEKIADKAKYKISLKELKEYSNKKNEIEKNYTMQQNLHRKYARPKKDEKFNDEDYKEYEKAIGNIQKYTHLKNKVEFNELNLLQGLLLKILHRLVGYTSIWERDLRFRLKGEFPENQYIEEIFNFDNSKNVKYKSGQIVEKYINFYKELYKDNVEKRSIYSDKKVKKLKQEKKDLYIRNYIAHFNYIPHAEISLLEVLENLRKLLSYDRKLKNAIMKSVVDILKEYGFVATFKIGADKKIGIQTLESEKIVHLKNLKKKKLMTDRNSEELCKLVKVMFEYKMEEKNLKTKKCKVI

SEQ ID NO: 17 - protein, 1224 aa, synthetic construct
  REGION 1..1224: note = Description of Artificial Sequence: Synthetic polypeptide
MKKIDNFVGCYPVSKTLRFKAIPIGKTQENIEKKRLVEEDEVRAKDYKAVKKLIDRYHREFIEGVLDNVKLDGLEEYYMLFNKSDREESDNKKIEIMEERFRRVISKSFKNNEEYKKIFSKKIIEEILPNYIKDEEEKELVKGFKGFYTAFVGYAQNRENMYSDEKKSTAISYRIVNENMPRFITNIKVFEKAKSILDVDKINEINEYILNNDYYVDDFFNIDFFNYVLNQKGIDIYNAIIGGIVTGDGRKIQGLNECINLYNQENKKIRLPQFKPLYKQILSESESMSFYIDEIESDDMLIDMLKESLQIDSTINNAIDDLKVLFNNIFDYDLSGIFINNGLPITTISNDVYGQWSTISDGWNERYDVLSNAKDKESEKYFEKRRKEYKKVKSFSISDLQELGGKDLSICKKINEIISEMIDDYKSKIEEIQYLFDIKELEKPLVTDLNKIELIKNSLDGLKRIERYVIPFLGTGKEQNRDEVFYGYFIKCIDAIKEIDGVYNKTRNYLTKKPYSKDKFKLYFENPQLMGGWDRNKESDYRSTLLRKNGKYYVAIIDKSSSNCMMNIEEDENDNYEKINYKLLPGPNKMLPKVFFSKKNREYFAPSKEIERIYSTGTFKKDTNFVKKDCENLITFYKDSLDRHEDWSKSFDFSFKESSAYRDISEFYRDVEKQGYRVSFDLLSSNAVNTLVEEGKLYLFQLYNKDFSEKSHGIPNLHTMYFRSLFDDNNKGNIRLNGGAEMFMRRASLNKQDVTVHKANQPIKNKNLLNPKKTTTLPYDVYKDKRFTEDQYEVHIPITMNKVPNNPYKINHMVREQLVKDDNPYVIGIDRGERNLIYVVVVDGQGHIVEQLSLNEIINENNGISIRTDYHTLLDAKERERDESRKQWKQIENIKELKEGYISQVVHKICELVEKYDAVIALEDLNSGFKNSRVKVEKQVYQKFEKMLITKLNYMVDKKKDYNKPGGVLNGYQLTTQFESFSKMGTQNGIMFYIPAWLTSKMDPTTGFVDLLKPKYKNKADAQKFFSQFDSIRYDNQEDAFVFKVNYTKFPRTDADYNKEWEIYTNGERIRVFRNPKKNNEYDYETVNVSERMKELFDSYDLLYDKGELKETICEMEESKFFEELIKLFRLTLQMRNSISGRTDVDYLISPVKNSNGYFYNSNDYKKEGAKYPKDADANGAYNIARKVLWAIEQFKMADEDKLDKTKISIKNQEWLEYAQTHCE

SEQ ID NO: 18 - protein, 1225 aa, synthetic construct
  REGION 1..1225: note = Description of Artificial Sequence: Synthetic polypeptide
MKKIDSFVNYYPLSKTLRFSLIPVGKTEDNFNAKLLLEEDEKRAIEYEKVKRYIDRYHKHFIETVLANFHLDDVNEYAELYYKAGKDDKDLKYMEKLEGKMRKSISAAFTKDKKYKEIFGQEIIKNILPEFLENEDEKESVKMFQGFFTYFTGFNDNRKNMYTHEAQTTAISYRCINENLPKFLDNVQSFAKIKESISSDIMNKLDEVCMDLYGVYAQDMFCTDYFSFVLSQSGIDRYNNIIGGYVDDKGVKIQGINEYINLYNQQVDEKNKRLPLMKKLYKQILIEKESISFIPEKFESDNIVINAISDYYHNNVENLFDDFNKLFNEFSEYDDNGIFVTSGLAVTDISNAVFGSWNIISDSWNEEYKDSHPMKKTTNAEKYYEDMKKEYKKNLSFTIAELQRLGEAGCNDECKGDIKEYYKTTVAEKIENIKNAYEISKDLLASDYEKSNDKKLCKNDSAISLLKNLLDSIKDLEKTIKPLLGTGKEENKDDVFYGKFTNLYEMISEIDRLYDKVRNYVTQKPYSKDKIKLNFENPQHLGGWDKNKERDYRSVLLKKEDKYYLAIMDKSNNKAFIDFPDDGECYEKIEYKLLPGPNKMLPKVFFASSNIEYFAPSKKILEIRSRESFKKGDMFNLKDCHEFIDFFKESIKKHEDWSQFGFEFSPTEKYNDISEFYNEVKIQGYSLKYKNVSKKYIDELIECGQLYLFQIYNKDFSVYAKGNPNLHTMYFKMLFDERNLANVVYQLNGGAEMFYRKASIKDSEKIVHHANQPIKNKNADNVKKESVFEYDIIKDKRFTKRQFSIHIPITLNFKAKGQNFINNDVRMALKKADENYVIGIDRGERNLLYICVINSKGEIVEQKSLNEIIGDNGYRVDYHKLLDKKEAERDEARKSWGTIENIKELKEGYLSQIVHEISKLVIKYDAVIAIEDLNSGFKKGRFKVEKQVYQKFENMLCTKLNYLVDKNADANECGGLLKAYQLTNKEDGANRGRQNGIIFSVPAWLTSKIDPVTGFADLLRPKYKSVSESVEFISKIDNIRYNSKEDYFEFDIDYSKFPNSTASYKKKWTVCTYGERIINVRNKEKNNMWDNKTIVLTDEFKKLFADFGVDVSKNIKESVLAIDSKDFYYRFINLLANTLQLRNSEVGNVDVDYLISPVKGVDGSFYDSRLVKEKTLPENADANGAYNIARKALWAIDVLKQTKDEELKNANLSIKNAEWLEYVQK

SEQ ID NO: 19 - protein, 1165 aa, synthetic construct
  REGION 1..1165: note = Description of Artificial Sequence: Synthetic polypeptide
MKNQNTLPSNPTDILKDKPFWAAFFNLARHNVYLTVNHINKLLDLEKLYNKDKHKEIFEHEDIFNISDDVMNDVNSNGKKRKLDIKKIWANLDTDLTRKYQLRELILKHFPFIQPAIIGAQTKERTTIDKDKRSTSTSNDSLKPTGEGDINDPLSLSNVKSIFFRLLQMLEQLRNYYSHVKHSKSATMPNFDEGLLKSMYNIFIDSVNKVKEDYSSNSVIDPNTSFSHLISKDEQGEIKPCRYSFTSKDGSINASGLLFFVSLFLEKQDSIWMQKKIPGFKKTSENYMKMTNEVFCRNHILLPKMRLETVYDKDWMLLDMLNEVVRCPLSLYKRLAPADQNKFKVPEKSSDNANRQEDDNPFSRILVRHQNRFPYFALRFFDLNEVFTTLRFQINLGCYHFAICKKQIGDKKEVHHLTRTLYGFSRLQNFTQNTRPEEWNTLVKTTEPSSGNDGKTVQGVPLPYISYTIPHYQIENEKIGIKIFDGDTAVDTDIWPSVSTEKQLNKPDKYTLTPGFKADVFLSVHELLPMMFYYQLLLCEGMLKTDAGNAVEKVLIDTRNAIFNLYDAFVQEKINTITDLENYLQDKPILIGHLPKQMIDLLKGHQRDMLKAVEQKKAMLIKDTERRLERLNKQPEQKPNVAAKNTGTLLRNGQIADWLVKDMMRFQPVKRDKEGNPINCSKANSTEYQMLQRAFAFYTTDSYRLPRYFEQLHLINCDNSHLFLSRFEYDKQPNLIAFYAAYLEAKLEFLNELQPQNWASDNYFLLLRAPKNDRQKLAEGWKNGFNLPRGLFTEKIKTWFNEHKTIVDISDCDIFKNRVGQVARLIPVFFDKKFKDHSQPFYTYNFNVGNVSKITEANYLSKEKRENLFKSYQNKFKNNIPAEKTKEYREYKNFSSWKKFERELRLIKNQDILTWLMCKNLFDEKIKPKKDILEPRIAVSYIKLDSLQTNTSTAGSLNALAKVVPMTLAIHIDSPKPKGKAGNNEKENKEFTVYIKEEGTKLLKWGNFKTLLADRRIKGLFSYIEHDDINLEKYPLTKYQVDSELDLYQKYRIDIFKQTLDLEAQLLDKYSDLNTDNFNQMLSGWSEKEGIPRNIKQDVAFLIGVRNGFSHNQYPDSKRIAFSRIKKFNPKTSSLQESEGLNIAKQMYEEAQQVVNKIKNIESFD

SEQ ID NO: 20 - protein, 1194 aa, synthetic construct
  REGION 1..1194: note = Description of Artificial Sequence: Synthetic polypeptide
MKVTKIDGISHKKFEDEGKLVKFTGHFNIKNEMKERLEKLKELKLSNYIKNPENVKNKDKNKEKETKSRRENLKKYFSEIILRKKEEKYLLKKTRKFKNITEEINYDDIKKRENQQKIFDVLKELLEQRINENDKEEILNFDSVKLKEAFEEDFIKKELKIKAIEESLEKNRADYRKDYVELENEKYEDVKGQNKRSLVFEYYKNPENREKFKENIKYAFENLYTEENIKNLYSEIKEIFEKVHLKSKVRYFYQNEIIGESEFSEKDEEGISILYKQIINSVEKKEKFIEFLQKVKIKDLTRSQIFYKYFLENEELNDENIKYVFSYFVEIEVNKLLKENVYKTKKFNEGNKYRVKNIFNYDKLKNLVVYKLENKLNNYVRNCGKYNYHMENGDIATSDINMKNRQTEAFLRSILGVSSFGYFSLRNILGVNDDDFYKIEKDERKNENFILKKAKEDFTSKNIFEKVVDKSFEKKGIYQIKENLKMFYGNSFDKVDKDELKKFFVNMLEAITSVRHRIVHYNINTNSENIFDFSNIEVSKLLKNIFEKEIDTRELKLKIFRQLNSAGVFDYWESWVIKKYLENVKFEFVNKNVPFVPSFKKLYDRIDNLKGWNALKLGNNINIPKRKEAKDSQIYLLKNIYYGEFVEKFVNDNKNFEKIVKEIIEINRGAGTNKKTGFYKLEKFETLKANTPTKYLEKLQSLHKISYDKEKIEEDKDVYVDFVQKIFLKGFVNYLKKLDSLKSLNLLNLRKDETITDKKSVHDEKLKLWENSGSNLSKMPEEIYEYVKKIKISNINYNDRMSIFYLLLKLIDYRELTNLRGNLEKYESMNKNKIYSEELTIINLVNLDNNKVRTNFSLEAEDIGKFLKSSITIKNIAQLNNFSKIFADGENVIKHRSFYNIKKYGILDLLEKIVAKADLKITKEEIKKYENLQNELKRNDFYKIQEQIHRNYNQKPFSIKKIENKKDFEKYKKVIEKIQDYTQLKNKIEFNDLNLLQSLIFRILHRLAGYTSLWERDLQFKLKGEFPEDKYIDEIFNSDGNNNQKYKHGGIADKYANFLIEKKEEKSGEILNKKQRKKKIKEDLEIRNYIAHFNYLPNAEKSILEILEELRELLKHDRKLKNAVMKSIKDIFREYGFIVEFTISHTKNGKKIKVCSVKSEKIKHLKNNELITTRNSEDLCELVKIMLEHKELQK

SEQ ID NO: 21 - protein, 1159 aa, synthetic construct
  REGION 1..1159: note = Description of Artificial Sequence: Synthetic polypeptide
MKVTKVGGISHKKYTSEGRLVKSESEENRTDERLSALLNMRLDMYIKNPSSTETKENQKRIGKLKKFFSNKMVYLKDNTLSLKNGKKENIDREYSETDILESDVRDKKNFAVLKKIYLNENVNSEELEVFRNDIKKKLNKINSLKYSFEKNKANYQKINENNIEKVEGKSKRNIIYDYYRESAKRDAYVSNVKEAFDKLYKEEDIAKLVLEIENLTKLEKYKIREFYHEIIGRKNDKENFAKIIYEEIQNVNNMKELIEKVPDMSELKKSQVFYKYYLDKEELNDKNIKYAFCHFVEIEMSQLLKNYVYKRLSNISNDKIKRIFEYQNLKKLIENKLLNKLDTYVRNCGKYNYYLQDGEIATSDFIARNRQNEAFLRNIIGVSSVAYFSLRNILETENENDITGRMRGKTVKNNKGEEKYVSGEVDKIYNENKKNEVKENLKMFYSYDFNMDNKNEIEDFFANIDEAISSIRHGIVHFNLELEGKDIFAFKNIAPSEISKKMFQNEINEKKLKLKIFRQLNSANVFRYLEKYKILNYLKRTRFEFVNKNIPFVPSFTKLYSRIDDLKNSLGIYWKTPKTNDDNKTKEIIDAQIYLLKNIYYGEFLNYFMSNNGNFFEISKEIIELNKNDKRNLKTGFYKLQKFEDIQEKIPKEYLANIQSLYMINAGNQDEEEKDTYIDFIQKIFLKGFMTYLANNGRLSLIYIGSDEETNTSLAEKKQEFDKFLKKYEQNNNIKIPYEINEFLREIKLGNILKYTERLNMFYLILKLLNHKELTNLKGSLEKYQSANKEEAFSDQLELINLLNLDNNRVTEDFELEADEIGKFLDFNGNKVKDNKELKKFDTNKIYFDGENIIKHRAFYNIKKYGMLNLLEKIADKAGYKISIEELKKYSNKKNEIEKNHKMQENLHRKYARPRKDEKFTDEDYESYKQAIENIEEYTHLKNKVEFNELNLLQGLLLRILHRLVGYTSIWERDLRFRLKGEFPENQYIEEIFNFENKKNVKYKGGQIVEKYIKFYKELHQNDEVKINKYSSANIKVLKQEKKDLYIRNYIAHFNYIPHAEISLLEVLENLRKLLSYDRKLKNAVMKSVVDILKEYGFVATFKIGADKKIGIQTLESEKIVHLKNLKKKKLMTDRNSEELCKLVKIMFEYKMEEKKSEN

SEQ ID NO: 22 - protein, 1134 aa, synthetic construct
  REGION 1..1134: note = Description of Artificial Sequence: Synthetic polypeptide
MNELVKNRCKQTKTICQKLIPIGKTRETIEKYNLMEIDRKIAANKELMNKLFSLIAGKHINDTLSKCTDLDFEPLLTSLSSLNNAKENDRDNLREYYDSVFEEKKTLAEEISSRLTAVKFAGKDFFTKNIPDFLETYEGDDKNEMSELVSLVIENTVTAGYVKKLEKIDRSMEYRLVSGTVVKRVLTDNADIYEKNIEKAKDFDYGVLNIDEASQFTTLVAKDYANYLTADGIAIYNVGIGKINLALNEYCQKNKEYSYNKLALLPLQKMLYGEKLSLFEKLEDFTSDEELINSYNKFAKTVNESGLAEIIKKAVPSYDEIVIKPNKISNYSNSITGHWSLVNRIMKDYLENNGIKNADKYMEKGLTLSEIGDALENKNIKHSDFISNLINDLGHTYTEIKENKESLKKDESVNALIIKKELDMLLSILQNLKVFDIDNEMFDTGFGIEVSKAIEILGYGVPLYNKIRNYITKKPDPKKKFMTKFGSATIGTGITTSVEGSKKATFLKDGDAVFLLLYNTAGCKANNVSVSNLADLINSSLEIENSGKCYQKMIYQTPGDIKKQIPRVFVYKSEDDDLIKDFKAGLHKTDLSFLNGRLIPYLKEAFATHETYKNYTFSYRNSYESYDEFCEHMSEQAYILEWKWIDKKLIDDLVEDGSLLMFRVWNRFMKKKEGKISKHAKIVNELFSDENASNAAIKLLSVFDIFYRDKQIDNPIVHKAGTTLYNKRTKDGEVIVDYTTMVKNKEKRPNVYTTTKKYDIIKDRRYTEEQFEIHLHVNIGKEENKEKLETSKVINEKKNTLVVTRSNEHLLYVVIFDENDNILLKKSLNTVKGMNFKSKLEVVEIQKKENMQSWKTVGSNQALMEGYLSFAIKEIADLVKEYDAILVLEQNSVGKNILNERVYTRFKEMLITNLSLDVDYENKDFYSYTELGGKVASWRDCVTNGICIQVPSAYKYKDPTTSFSTISMYAKTTAEKSKKLKQIKSFKYNRERGLFELVIAKGVGLENNIVCDSFGSRSIIENDISKEVSCTLKIEKYLIDAGIEYNDEKEVLKDLDTAAKTDAVHKAVTLLLKCFNESPDGRYYISPCGEHFTLCDAPEVLSAINYYIRSRYIREQIVEGVKKMEYKKTILLAK

SEQ ID NO: 23 - protein, 1282 aa, synthetic construct
  REGION 1..1282: note = Description of Artificial Sequence: Synthetic polypeptide
MNGNRIIVYREFVGVTPVAKTLRNELRPIGHTQEHIIHNGLIQEDELRQEKSTELKNIMDDYYREYIDKSLSGVTDLDFTLLFELMNLVQSSPSKDNKKALEKEQSKMREQICTHMQSDSNYKNIFNAKFLKEILPDFIKNYNQYDAKDKAGKLETLALFNGFSTYFTDFFEKRKNVFTKEAVSTSIAYRIVHENSLTFLANMTSYKKISEKALDEIEVIEKNNQDKMGDWELNQIFNPDFYNMVLIQSGIDFYNEICGVVNAHMNLYCQQTKNNYNLFKMRKLHKQILAYTSTSFEVPKMFEDDMSVYNAVNAFIDETEKGNIIGKLKDIVNKYDELDEKRIYISKDFYETLSCFMSGNWNLITGCVENFYDENIHAKGKSKEEKVKKAVKEDKYKSINDVNDLVEKYIDEKERNEFKNSNAKQYIREISNIITDTETAHLEYDEHISLIESEEKADEMKKRLDMYMNMYHWAKAFIVDEVLDRDEMFYSDIDDIYNILENIVPLYNRVRNYVTQKPYNSKKIKLNFQSPTLANGWSQSKEFDNNAIILIRDNKYYLAIFNAKNKPDKKIIQGNSDKKNDNDYKKMVYNLLPGANKMLPKVFLSKKGIETFKPSDYIISGYNAHKHIKTSENFDISFCRDLIDYFKNSIEKHAEWRKYEFKFSATDSYNDISEFYREVEMQGYRIDWTYISEADINKLDEEGKIYLFQIYNKDFAENSTGKENLHTMYFKNIFSEENLKDIIIKLNGQAELFYRRASVKNPVKHKKDSVLVNKTYKNQLDNGDVVRIPIPDDIYNEIYKMYNGYIKENDLSEAAKEYLDKVEVRTAQKDIVKDYRYTVDKYFIHTPITINYKVTARNNVNDMAVKYIAQNDDIHVIGIDRGERNLIYISVIDSHGNIVKQKSYNILNNYDYKKKLVEKEKTREYARKNWKSIGNIKELKEGYISGVVHEIAMLMVEYNAIIAMEDLNYGFKRGRFKVERQVYQKFESMLINKLNYFASKGKSVDEPGGLLKGYQLTYVPDNIKNLGKQCGVIFYVPAAFTSKIDPSTGFISAFNFKSISTNASRKQFFMQFDEIRYCAEKDMFSFGFDYNNFDTYNITMSKTQWTVYTNGERLQSEFNNARRTGKTKSINLTETIKLLLEDNEINYADGHDVRIDMEKMDEDKNSEFFAQLLSLYKLTVQMRNSYTEAEEQEKGISYDKIISPVINDEGEFFDSDNYKESDDKECKMPKDADANGAYCIALKGLYEVLKIKSEWTEDGFDRNCLKLPHAEWLDFIQNKRYE

SEQ ID NO: 24 - protein, 1399 aa, synthetic construct
  REGION 1..1399: note = Description of Artificial Sequence: Synthetic polypeptide
MNKDIRKNFTDFVGISEIQKTLRFILIPIGKTAQNIDKYNMFEDDEIRHEYYPILKEACDDFYRNHIDQQFENLELDWSKLDEALASEDRDLINETRATYRQVLFNRLKNSVDIKGDSKKNKTLSLESSDKNLGKKKTKNTFQYNFNDLFKAKLIKAILPLYIEYIYEGEKLENAKKALKMYNRFTSRLSNFWQARANIFTDDEISTGSPYRLVNDNFTIFRINNSIYTKNKPFIEEDILEFEKKLKSKKIIKDFESVDDYFTVNAFNKLCTQNGIDKYNSILGGFTTKEREKVKGLNELFNLAQQSINKGKKGEYRKNIRLGKLTKLKKQILAISDSTSFLIEQIEDDQDLYNKIKDFFELLLKEEIENENIFTQYANLQKLIEQADLSKIYINAKHLNKISHQVTGKWDSLNKGIALLLENININEESKEKSEVISNGQTKDISSEAYKRYLQIQSEEKDIERLRTQIYFSLEDLEKALDLVLIDENMDRSDKSILSYVQSPDLNVNFERDLTDLYSRIMKLEENNEKLLANHSAIDLIKEFLDLIMLRYSRWQILFCDSNYELDQTFYPIYDAVMEILSNIIRLYNLARNYLSRKPDRMKKKKINFNNPTLADGWSESKIPDNSSMLFIKDGMYYLGIIKNRAAYSELLEAESLQSSEKKKSENSSYERMNYHFLPDAFRSIPKSSIAMKAVKEHFEINQKTADLLLDTDKFSKPLRITKEIFDMQYVDLHKNKKKYQVDYLRDTGDKKGYRKALNTWLNFCKDFISKYKGRNLFDYSKIKDADHYETVNEFYNDVDKYSYHIFFTSVAETTVEKFISEGKLYLFQLYNKDFSPHSTGKPNLHTIYWRALFSEENLTSKNIKLNGQAEIFFRPKQIETPFTHKKGSILVNRFDVNGNPIPINVYQEIKGFKNNVIKWDDLNKTTQEGLENDQYLYFESEFEIIKDRRYTEDQLFFHVPISFNWDIGSNPKINDLATQYIVNSNDIHIIGIDRGENHLIYYSVIDLQGAIVEQGSLNTITEYTENKFLNNKTNNLRKIPYKDILQQREDERADARIKWHAIDKIKDLKDGYLGQIVHFLAKLIIKYNAIVILEDLNYGFKRGRFKVERQVYQKFEMALMKKLNVLVFKDYDIDEIGGPLKPWQLTRPIDSYERMGRQNGILFYVPAAYTSAVDPVTGFANLFYLNNVKNSEKFHFFSKFESIKYHSDQDMFSFAFDYNNFGTTTRINDLSKSKWQVFTNHERSVWNNKEKNYVTQNLTDLIKKLLRTYNIEFKNNQNVLDSILKIENNTDKENFARELFRLFRLTIQLRNTTVNENNTEITENELDYIISPVKDKNGNFFDSRDELKNLPDNGDANGAYNIARKGLLYIEQLQESIKTGKLPTLSISTLDWFNYIMK

SEQ ID NO: 25 - protein, 1313 aa, synthetic construct
  REGION 1..1313: note = Description of Artificial Sequence: Synthetic polypeptide
MNKGGYVIMEKMTEKNRWENQFRITKTIKEEIIPTGYTKVNLQRVNMLKREMERNEDLKKMKEICDEYYRNMIDVSLRLEQVRTLGWESLIHKYRMLNKDEKEIKALEKEQEDLRKKISKGFGEKKAWTGEQFIKKILPQYLMDHYTGEELEEKLRIVKKFKGCTMFLSTFFKNRENIFTDKPIHTAVGHRITSENAMLFAANINTYEKMESNVTLEIERLQREFWRRGINISEIFTDAYYVNVLTQKQIEAYNKICGDINQHMNEYCQKQKLKFSEFRMRELKKQILAVVGEHFEIPEKIESTKEVYRELNEYYESLKELHGQFEELKSVQLKYSQIYVQKKGYDRISRYIGGQWDLIQECMKKDCASGMKGTKKNHDAKIEEEVAKVKYQSIEHIQKLVCTYEEDRGHKVTDYVDEFIVSVCDLLGADHIITRDGERIELPLQYEPGTDLLKNDTINQRRLSDIKTILDWHMDMLEWLKTFLVNDLVIKDEEFYMAIEELNERMQCVISVYNRIRNYVTQKGYEPEKIRICFDKGTILTGWTTGDNYQYSGFLLMRNDKYYLGIINTNEKSVRKILDGNEECKDENDYIRVGYHLINDASKQLPRIFVMPKAGKKSEILMKDEQCDYIWDGYCHNKHNESKEFMRELIDYYKRSIMNYDKWEGYCFKFSSTESYDNMQDFYKEVREQSYNISFSYINENVLEQLDKDGKIYLFQVYNKDFAAGSTGTPNLHTMYLQNLFSSQNLELKRLRLGGNAELFYRPGTEKDVTHRKGSILVDRTYVREEKDGIEVRDTVPEKEYLEIYRYLNGKQKGDLSESAKQWLDKVHYREAPCDIIKDKRYAQEKYFLHFSVEINPNAEGQTALNDNVRRWLSEEEDIHVIGIDRGERNLIYVSLMDGKGRIKDQKSYNIVNSGNKEPVDYLAKLKVREKERDEARRNWKAIGKIKDIKTGYLSYVVHEIVEMAVREKAIIVMEDLNYGFKRGRFKVERQVYQKFEEMLINKLNYVVDKQLSVDEPGGLLRGYQLAFIPKDKKSSMRQNGIVFYVPAGYTSKIDPTTGFVNIFKFPQFGKGDDDGNGKDYDKIRAFFGKFDEIRYECDEKVTADNTREVKERYRFDFDYSKFETHLVHMKKTKWTVYAEGERIKRKKVGNYWTSEVISDIALRMSNTLNIAGIEYKDGHNLVNEICALRGKQAGIILNELLEIVRLTVQLRNSTTEGDVDERDEIISPVLNEKYGCFYHSTEYKQQNGDVLPKDADANGAYCIGLKGIYEIRQIKNKWKEDMTKGEGKALNEGMRISHDQWFEFIQNMNKGE

SEQ ID NO: 26 - protein, 1470 aa, synthetic construct
  REGION 1..1470: note = Description of Artificial Sequence: Synthetic polypeptide
MNNPRGAFGGFTNLYSLSKTLRFELKPYLEIPEGEKGKLFGDDKEYYKNCKTYTEYYLKKANKEYYDNEKVKNTDLQLVNFLHDERIEDAYQVLKPVFDTLHEEFITDSLESAEAKKIDFGNYYGLYEKQKSEQNKDEKKKIDKPLETERGKLRKAFTPIYEAEGKNLKNKAGKEKKDKDILKESGFKVLIEAGILKYIKNNIDEFADKKLKNNEGKEITKKDIETALGAENIEGIFDGFFTYFSGFNQNRENYYSTEEKATAVASRIVDENLSKFCDNILLYRKNENDYLKIFNFLKNKGKDLKLKNSKFGKENEPEFIPAYDMKNDEKSFSVADFVNCLSQGEIEKYNAKIANANYLINLYNQNKDGNSSKLSMFKILYKQIGCGEKKDFIKTIKDNAELKQILEKACEAGKKYFIRGKSEDGGVSNIFDFTDYIQSHENYKGVYWSDKAINTISGKYFANWDTLKNKLGDAKVFNKNTGEDKADVKYKVPQAVMLSELFAVLDDNAGEDWREKGIFFKASLFEGDQNKSEIIKNANRPSQALLKMICDDMESLAKNFIDSGDKILKISDRDYQKDENKQKIKNWLDNALWINQILKYFKVKANKIKGDSIDARIDSGLDMLVFSSDNPAEDYDMIRNYLTQKPQDEINKLKLNFENSSLAGGWDENKEKDNSCIILKDEQDKQYLAVMKYENTKVFEQKNSQLYIADNAAWKKMIYKLVPGASKTLPKVFFSKKWTANRPTPSDIVEIYQKGSFKKENVDFNDKKEKDESRKEKNREKIIAELQKTCWMDIRYNIDGKIESAKYVNKEKLAKLIDFYKENLKKYPSEEESWDRLFAFGFSDTKSYKSIDQFYIEVDKQGYKLEFVTINKARLDEYVRDGKIYLFEIRSRDNNLVNGEEKTSAKNLQTIYWNAAFGGDDNKPKLNGEAEIFYRPAIAENKLNKKKDKNGKEIIDGYRFSKEKFIFHCPITLNFCLKETKINDKLNAALAKPENGQGVYFLGIDRGEKHLAYYSLVNQKGEILEQGTLNLPFLDKNGKSRSIKVEKKSFEKDSNGGIIKDKDGNDKIKIEFVECWNYNDLLDARAGDRDYARKNWTTIGTIKELKDGYISQVVRKIVDLSIYKNTETKEFREMPAFIVLEDLNIGFKRGRQKIEKQVYQKLELALAKKLNFLVDKKADIGEIGSVTKAIQLTPPVNNFGDMENRKQFGNMLYIRADYTSQTDPATGWRKSIYLKSGSESNVKEQIEKSFFDIRYESGDYCFEYRDRHGKMWQLYSSKNGVSLDRFHGERNNSKNVWESEKQPLNEMLDILFDEKRFDKSKSLYEQMFKGGVALTRLPKEINKKDKPAWESLRFVIILIQQIRNTGKNGDDRNGDFIQSPVRDEKTGEHFDSRIYLDKEQKGEKADLPTSGDANGAYNIARKGIVVAEHIKRGFDKLYISDEEWDTWLAGDEIWDKWLKENRESLTKTRK

SEQ ID NO: 27 - protein, 1259 aa, synthetic construct
  REGION 1..1259: note = Description of Artificial Sequence: Synthetic polypeptide
MNYKTGLEDFIGKESLSKTLRNALIPTESTKIHMEEMGVIRDDELRAEKQQELKEIMDDYYRTFIEEKLGQIQGIQWNSLFQKMEETMEDISVRKDLDKIQNEKRKEICCYFTSDKRFKDLFNAKLITDILPNFIKDNKEYTEEEKAEKEQTRVLFQRFATAFTNYFNQRRNNFSEDNISTAISFRIVNENSEIHLQNMRAFQRIEQQYPEEVCGMEEEYKDMLQEWQMKHIYSVDFYDRELTQPGIEYYNGICGKINEHMNQFCQKNRINKNDFRMKKLHKQILCKKSSYYEIPFRFESDQEVYDALNEFIKTMKKKEIIRRCVHLGQECDDYDLGKIYISSNKYEQISNALYGSWDTIRKCIKEEYMDALPGKGEKKEEKAEAAAKKEEYRSIADIDKIISLYGSEMDRTISAKKCITEICDMAGQISIDPLVCNSDIKLLQNKEKTTEIKTILDSFLHVYQWGQTFIVSDIIEKDSYFYSELEDVLEDFEGITTLYNHVRSYVTQKPYSTVKFKLHFGSPTLANGWSQSKEYDNNAILLMRDQKFYLGIFNVRNKPDKQIIKGHEKEEKGDYKKMIYNLLPGPSKMLPKVFITSRSGQETYKPSKHILDGYNEKRHIKSSPKFDLGYCWDLIDYYKECIHKHPDWKNYDFHFSDTKDYEDISGFYREVEMQGYQIKWTYISADEIQKLDEKGQIFLFQIYNKDFSVHSTGKDNLHTMYLKNLFSEENLKDIVLKLNGEAELFFRKASIKTPIVHKKGSVLVNRSYTQTVGNKEIRVSIPEEYYTEIYNYLNHIGKGKLSSEAQRYLDEGKIKSFTATKDIVKNYRYCCDHYFLHLPITINFKAKSDVAVNERTLAYIAKKEDIHIIGIDRGERNLLYISVVDVHGNIREQRSFNIVNGYDYQQKLKDREKSRDAARKNWEEIEKIKELKEGYLSMVIHYIAQLVVKYNAVVAMEDLNYGFKTGRFKVERQVYQKFETMLIEKLHYLVFKDREVCEEGGVLRGYQLTYIPESLKKVGKQCGFIFYVPAGYTSKIDPTTGFVNLFSFKNLTNRESRQDFVGKFDEIRYDRDKKMFEFSFDYNNYIKKGTILASTKWKVYTNGTRLKKIVVNGKYTSQSMEVELTDAMEKMLQRAGIEYHDGKDLKGQIVEKGIEAEIIDIFRLTVQMRNSRSESEDREYDRLISPVLNDKGEFFDTATADKTLPQDADANGAYCIALKGLYEVKQIKENWKENEQFPRNKLVQDNKTWFDFMQKKRYL

SEQ ID NO: 28 - protein, 477 aa, synthetic construct
  REGION 1..477: note = Description of Artificial Sequence: Synthetic polypeptide
MRISKTLSLRIVRPFYTPEVEAGIKAEKDKREAQGQTRSLDAKFFNELKKKHSEIILSSEFYSLLSEVQRQLTSIYNHAMSNLYHKIIVEGEKTSTSKALSNIGYDECKAIFPSYMALGLRQKIQSNFRRRDLKNFRMAVPTAKSDKFPIPIYRQVDGSKGGFKISENDGKDFIVELPLVDYVAEEVKTAKGRFTKINISKPPKIKNIPVILSTLRRRQSGQWFSDDGTNAEIRRVISGEYKVSWIEIVRRTRFGKHDDWFVNMVIKYDKPEEGLDSKVVGGIDVGVSSPLVCALNNSLDRYFVKSSDIIAFNKRAMARRRTLLRQNKYKRSGHGSKNKLEPITVLTEKNERFKKSIMQRWAKEVAEFFRGKGASVVRMEELSGLKEKDNFFSSYLRMYWNYGQLQQIIENKLKEYGIKVNYVSPKDTSKKCHSCTHINEFFTFEYRQKNNFPLFKCEKCGVECSADYNAAKNMAIA

SEQ ID NO: 29 - protein, 1293 aa, synthetic construct
  REGION 1..1293: note = Description of Artificial Sequence: Synthetic polypeptide
MRTMVTFEDFTKQYQVSKTLRFELIPQGKTLENMKRDGIISVDRQRNEDYQKAKGILDKLYKYILDFTMETVVIDWEALATATEEFRKSKDKKTYEKVQSKIRTALLEHVKKQKVGTEDLFKGMFSSKIITGEVLAAFPEIRLSDEENLILEKFKDFTTYFTGFFENRKNVFTDEALSTSFTYRLVNDNFIKFFDNCIVFKNVVNISPHMAKSLETCASDLGIFPGVSLEEVFSISFYNRLLTQTGIDQFNQLLGGISGKEGEHKQQGLNEIINLAMQQNLEVKEVLKNKAHRFTPLFKQILSDRSTMSFIPDAFADDDEVLSAVDAYRKYLSEKNIGDRAFQLISDMEAYSPELMRIGGKYVSVLSQLLFYSWSEIRDGVKAYKESLITGKKTKKELENIDKEIKYGVTLQEIKEALPKKDIYEEVKKYAMSVVKDYHAGLAEPLPEKIETDDERASIKHIMDSMLGLYRFLEYFSHDSIEDTDPVFGECLDTILDDMNETVPLYNKVRNFSTRKVYSTEKFKLNFNNSSLANGWDKNKEQANGAILLRKEGEYFLGIFNSKNKPKLVSDGGAGIGYEKMIYKQFPDFKKMLPKCTISLKDTKAHFQKSDEDFTLQTDKFEKSIVITKQIYDLGTQTVNGKKKFQVDYPRLTGDMEGYRAALKEWIDFGKEFIQAYTSTAIYDTSLFRDSSDYPDLPSFYKDVDNICYKLTFEWIPDAVIDDCIDDGSLYLFKLHNKDFSSGSIGKPNLHTLYWKALFEEENLSDVVVKLNGQAELFYRPKSLTRPVVHEEGEVIINKTTSTGLPVPDDVYVELSKFVRNGKKGNLTDKAKNWLDKVTVRKMPHAITKDRRFTVDKFFFHVPITLNYKADSSPYRFNDFVRQYIKDCSDVKIIGIDRGERNLIYAVVIDGKGNIIEQRSFNTVGTYNYQEKLEQKEKERQTARQDWATVTKIKDLKKGYLSAVVHELSKMIVKYKAIVALENLNVGFKRMRGGIAERSVYQQFEKALIDKLNYLVFKDEEQSGYGGVLNAYQLTDKFESFSKMGQQTGFLFYVPAAYTSKIDPLTGFINPFSWKHVKNREDRRNFLNLFSKLYYDVNTHDFVLAYHHSNKDSKYTIKGNWEIADWDILIQENKEVFGKTGTPYCVGKRIVYMDDSTTGHNRMCAYYPHTELKKLLSEYGIEYTSGQDLLKIIQEFDDDKLVKGLFYIIKAALQMRNSNSETGEDYISSPIEGRPGICFDSRAEADTLPYDADANGAFHIAMKGLLLTERIRNDDKLAISNEEWLNYIQEMRG

SEQ ID NO: 30 - protein, 1228 aa, synthetic construct
  REGION 1..1228: note = Description of Artificial Sequence: Synthetic polypeptide
MSKLEKFTNCYSLSKTLRFKAIPVGKTQENIDNKRLLVEDEKRAEDYKGVKKLLDRYYLSFINDVLHSIKLKNLNNYISLFRKKTRTEKENKELENLEINLRKEIAKAFKGNEGYKSLFKKDIIETILPEFLDDKDEIALVNSFNGFTTAFTGFFDNRENMFSEEAKSTSIAFRCINENLTRYISNMDIFEKVDAIFDKHEVQEIKEKILNSDYDVEDFFEGEFFNFVLTQEGIDVYNAIIGGFVTESGEKIKGLNEYINLYNQKTKQKLPKFKPLYKQVLSDRESLSFYGEGYTSDEEVLEVFRNTLNKNSEIFSSIKKLEKLFKNFDEYSSAGIFVKNGPAISTISKDIFGEWNVIRDKWNAEYDDIHLKKKAVVTEKYEDDRRKSFKKIGSFSLEQLQEYADADLSVVEKLKEIIIQKVDEIYKVYGSSEKLFDADFVLEKSLKKNDAVVAIMKDLLDSVKSFENYIKAFFGEGKETNRDESFYGDFVLAYDILLKVDHIYDAIRNYVTQKPYSKDKFKLYFQNPQFMGGWDKDKETDYRATILRYGSKYYLAIMDKKYAKCLQKIDKDDVNGNYEKINYKLLPGPNKMLPKVFFSKKWMAYYNPSEDIQKIYKNGTFKKGDMFNLNDCHKLIDFFKDSISRYPKWSNAYDFNFSETEKYKDIAGFYREVEEQGYKVSFESASKKEVDKLVEEGKLYMFQIYNKDFSDKSHGTPNLHTMYFKLLFDENNHGQIRLSGGAELFMRRASLKKEELVVHPANSPIANKNPDNPKKTTTLSYDVYKDKRFSEDQYELHIPIAINKCPKNIFKINTEVRVLLKHDDNPYVIGIDRGERNLLYIVVVDGKGNIVEQYSLNEIINNFNGIRIKTDYHSLLDKKEKERFEARQNWTSIENIKELKAGYISQVVHKICELVEKYDAVIALEDLNSGFKNSRVKVEKQVYQKFEKMLIDKLNYMVDKKSNPCATGGALKGYQITNKFESFKSMSTQNGFIFYIPAWLTSKIDPSTGFVNLLKTKYTSIADSKKFISSFDRIMYVPEEDLFEFALDYKNFSRTDADYIKKWKLYSYGNRIRIFRNPKKNNVFDWEEVCLTSAYKELFNKYGINYQQGDIRALLCEQSDKAFYSSFMALMSLMLQMRNSITGRTDVDFLISPVKNSDGIFYDSRNYEAQENAILPKNADANGAYNIARKVLWAIGQFKKAEDEKLDKVKIAISNKEWLEYAQTSVKH

SEQ ID NO: 31 - protein, 1286 aa, synthetic construct
  REGION 1..1286: note = Description of Artificial Sequence: Synthetic polypeptide
MTNFDNFTKKYVNSKTIRLEAIPVGKTLKNIEKMGFIAADRQRDEDYQKAKSVIDHIYKAFMDDCLKDLFLDWDPLYEAVVACWRERSPEGRQALQIMQADYRKKIADRFRNHELYGSLFTKKIFDGSVAQRLPDLEQSAEEKSLLSNFNKFTSYFRDFFDKRKRLFSDDEKHSAIAYRLINENFLKFVANCEAFRRMTERVPELREKLQNTGSLQVYNGLALDEVFSADFYNQLIVQKQIDLYNQLIGGIAGEPGTPNIQGLNATINLALQGDSSLHEKLAGIPHRFNPLYKQILSDVSTLSFVPSAFQSDGEMLAAVRGFKVQLESGRVLQNVRRLFNGLETEADLSRVYVNNSKLAAFSSMFFGRWNLCSDALFAWKKGKQKKITNKKLTEIKKWLKNSDIAIAEIQEAFGEDFPRGKINEKIQAQADALHSQLALPIPENLKALCAKDGLKSMLDTVLGLYRMLQWFIVGDDNEKDSDFYFGLGKILGSLDPVLVLYNRVRNYITKKPYSLTKFRLNFDNSQLLNGWDENNLDTNCASIFIKDGKYYLGISNKNNRPQFDTVATSGKSGYQRMVYKQFANWGRDLPHSTTQMKKVKKHFSASDADYVLDGDKFIRPLIITKEIFDLNNVKFNGKKKLQVDYLRNTGDREGYTHALHTWINFAKDFCACYKSTSIYDISCLRPTDQYDNLMDFYADLGNLSHRIVWQTIPEEAIDNYVEQGQLFLFQLYNKDFAPGADGKPNLHTLYWKAVFNPENLEDVVVKLNGKAELFYRPRSNMDVVRHKVGEKLVNRKLKNGLTLPSRLHEEIYRYVNGTLNKDLSADARSVLPLAVVRDVQHEIIKDRRFTADKFFFHASLTFNFKSSDKPVGFNEDVREYLREHPDTYVVGVDRGERNLIYIVVIDPQGNIVEQRSFNMINGIDYWSLLDQKEKERVEAKQAWETVGKIKDLKCGYLSFLIHEITKIIIKYHAVVILENLSLGFKRVRTGIAEKAVYQQFERMLVTKLGYVVFKDRAGKAPGGVLNAYQLTDNTRTAENTGIQNGFLFYVPAAFTSRVDPATGFFDFYDWGKIKTATDKKNFIAGFNSVRYERSTGDFIVHVGAKNLAVRRVAEDVRTEWDIVIEANVRKMGIDGNSYISGKRIRYRSGEQGHGQYENHLPCQELIRALQQYGIQYETGKDILPAILQQDDAKLTDTVFDVFRLALQMRNTSAETGEDYFNSVVRDRSGRCFDTRRAEAAMPKEADANDAYHIALKGLFVLEKLRKGESIGIKNTEWLRYVQQRHS

SEQ ID NO: 32 - protein, 1272 aa, synthetic construct
  REGION 1..1272: note = Description of Artificial Sequence: Synthetic polypeptide
MTPIFCNFVVYQIMLFNNNININVKTMNKKHLSDFTNLFPVSKTLRFRLEPQGKTMENIVKAQTIETDEERSHDYEKTKEYIDDYHRQFIDDTLDKFAFKVESTGNNDSLQDYLDAYLSANDNRTKQTEEIQTNLRKAIVSAFKMQPQFNLLFKKEMVKHLLPQFVDTDDKKRIVAKFNDFTTYFTGFFTNRENMYSDEAKSTSIAYRIVNQNLIKFVENMLTFKSHILPILPQEQLATLYDDFKEYLNVASIAEMFELDHFSIVLTQRQIEVYNSVIGGRKDENNKQIKPGLNQYINQHNQAVKDKSARLPLLKPLFNQILSEKAGVSFLPKQFKSASEVVKSLNEAYAELSPVLAAIQDVVTNITDYDCNGIFIKNDLGLTDIAQRFYGNYDAVKRGLRNQYELETPMHNGQKAEKYEEQVAKHLKSIESVSLAQINQVVTDGGDICDYFKAFGATDDGDIQRENLLASINNAHTAISPVLNKENANDNELRKNTMLIKDLLDAIKRLQWFAKPLLGAGDETNKDQVFYGKFEPLYNQLDETISPLYDKVRSYLTKKPYSLDKFKINFEKSNLLGGWDPGADRKYQYNAVILRKDNDFYLGIMRDEATSKRKCIQVLDCNDEGLDENFEKVEYKQIKPSQNMPRCAFAKKECEENADIMELKRKKNAKSYNTNKDDKNALIRHYQRYLDRTYPEFGFVYKDADEYDTVKAFTDSMDSQDYKLSFLQVSETGLNKLVDEGDLYLFKITNKDFSSYAKGRPNLHTIYWRMLFDPKNLANVVYKLEGKAEVFFRRKSLASTTTHKAKQAIKNKSRYNEAVKPQSTFDYDIIKDRRFTADKFEFHVPIKMNFKAAGWNSTRLTNEVREFIKSQGVRHIIGIDRGERHLLYLTMIDMDGNIVKQCSLNAPAQDNARASEVDYHQLLDSKEADRLAARRNWGTIENIKELKQGYLSQVVHLLATMMVDNDAILVLENLNAGFMRGRQKVEKSVYQKFEKMLIDKLNYIVDKGQSPDKPTGALHAVQLTGLYSDFNKSNMKRANVRQCGFVFYIPAWNTSKIDPVTGFVNLFDTHLSSMGEIKAFFSKFDSIRYNQDKGWFEFKFDYSRFTTRAEGCRTQWTVCTYGERIWTHRSKNQNNQFVNDTVNVTQQMLQLLQDCGIDPNGNLKEAIANIDSKKSLETLLHLFKLTVQMRNSVTGSEVDYMISPVADERGHFFDSRESDEHLPANADANGAFNIARKGLMVVRQIMATDDVSKIKFAVSNKDWLRFAQHIDD

SEQ ID NO: 33 - protein, 477 aa, synthetic construct
  REGION 1..477: note = Description of Artificial Sequence: Synthetic polypeptide
VKISKTLSLRIIRPYYTPEVESAIKAEKDKREAQGQTRNLDAKFFNELKKKHPQIILSGEFYSLLFEMQRQLTSIYNRAMSSLYHKIIVEGEKTSTSKALSDIGYDECKSVFPSYIALGLRQKIQSNFRRKELKGFRMAVPTAKSDKFPIPIYKQVDDGKGGFKISENKEGDFIVELPLVEYTAEDVKTAKGKFTKINISKPPKIKNIPVILSTLRRKQSGQWFSDEGTNAEIRRVISGEYKVSWIEVVRRTRFGKHDDWFLNIVIKYDKTEDGLDPEVVGGIDVGVSTPLVCAVNNSLDRYFVKSSDIIAFKKRAMARRRTLLRQNRFKRSGHGSKSKLEPITILTEKNERFKKSIMQRWAKEVAEFFKGERASVVQMEELSGLKEKDNFFGSYLRMYWNYGQLQQIIENKLKEYGIKVNYVSPKDTSKKCHSCGYINEFFTFEFRQKNNFPLFKCKKCGVECNADYNAAKNIAIA

SEQ ID NO: 34 - protein, 1281 aa, synthetic construct
  REGION 1..1281: note = Description of Artificial Sequence: Synthetic polypeptide
MLKSYDYFTKLYSLQKTLRFELKPIGKTLEHIKNSGIIESDETLEEQYAIVKNIIDKLHRKHIDEALSLVDFTKHLDTLKTFQELYLKRGKTDKEKEELEKLSADLRKLIVSYLKGNVKEKTQHNLNPIKERFEILFGKELFTNEEFFLLAENEKEKKAIQAFKGFTTYFKGFQENRKNMYSEEGNSTSIAYRIINENLPLFIENIARFQKVMSTIEKTTIKKLEQNLKTELKKHNLPGIFTIEYFNNVLTQEGISRYNTIIGGKTTHEGVKIQGLNEIINLYNQQSKDVKLPILKPLHKQILSEEYSTSFKIKAFENDNEVLKAIDTFWNEHIEKSIHPVTGNKFNILSKIENLCDQLQKYKDKDLEKLFIERKNLSTVSHQVYGQWNIIRDALRMHLEMNNKNIKEKDIDKYLDNDAFSWKEIKDSIKIYKEHVEDAKELNENGIIKYFSAMSINEEDDEKEYSISLIKNINEKYNNVKSILQEDRTGKSDLHQDKEKVGIIKEFLDSLKQLQWFLRLLYVTVPLDEKDYEFYNELEVYYEALLPLNSLYNKVRNYMTRKPYSVEKFKLNFNSPTLLDGWDKNKETANLSIILRKNGKYYLGIMNKENNTIFEYYPGTKSNDYYEKMIYKLLPGPNKMLPKVFFSKKGLEYYNPPKEILNIYEKGEFKKDKSGNFKKESLHTLIDFYKEAIAKNEDWEVFNFKFKNTKEYEDISQFYRDVEEQGYLITFEKVDANYVDKLVKEGKLYLFQIYNKDFSENKKSKGNPNLHTIYWKGLYDSENLKNVVYKLNGEAEVFYRKKSIDYPEEIYNHGHHKEELLGKFNYPIIKDRRYTQDKFLFHVPITMNFISKEEKRVNQLACEYLSATKEDVHIIGIDRGERHLLYLSLIDKEGNIKKQLSLNTIKNENYDKEIDYRVKLDEKEKKRDEARKNWDVIENIKELKEGYMSQVIHIIAKMMVEEKAILIMEDLNIGFKRGRFKVEKQVYQKFEKMLIDKLNYLVFKNKNPLEPGGSLNAYQLTSKFDSFKKLGKQSGFIFYVPSAYTSKIDPTTGFYNFIQVDVPNLEKGKEFFSKFEKIIYNTKEDYFEFHCKYGKFVSEPKNKDNDRKTKESLTYYNAIKDTVWVVCSTNHERYKIVRNKAGYYESHPVDVTKNLKDIFSQANINYNEGKDIKPIIIESNNAKLLKSIAEQLKLILAMRYNNGKHGDDEKDYILSPVKNKQGKFFCTLDGNQTLPINADANGAYNIALKGLLLIEKIKKQQGKIKDLYISNLEWFMFMMSR

SEQ ID NO: 35 - DNA, 16 bp, synthetic construct
  misc_feature 1..16: note = Description of Artificial Sequence: Synthetic oligonucleotide
  source 1..16: mol_type = other DNA
ttgctttcgtggtatt

SEQ ID NO: 36 - DNA, 15 bp, synthetic construct
  misc_feature 1..15: note = Description of Artificial Sequence: Synthetic oligonucleotide
  source 1..15: mol_type = other DNA
ggatggctagtgtaa

SEQ ID NO: 37 - DNA, 16 bp, synthetic construct
  misc_feature 1..16: note = Description of Artificial Sequence: Synthetic oligonucleotide
  source 1..16: mol_type = other DNA
tttgcccccagcgctt

SEQ ID NO: 38 - DNA, 16 bp, synthetic construct
  misc_feature 1..16: note = Description of Artificial Sequence: Synthetic oligonucleotide
  source 1..16: mol_type = other DNA
atgcgcgacattccga

SEQ ID NO: 39 - DNA, 16 bp, synthetic construct
  misc_feature 1..16: note = Description of Artificial Sequence: Synthetic oligonucleotide
  source 1..16: mol_type = other DNA
atttgcccccagcgct

SEQ ID NO: 40 - DNA, 16 bp, synthetic construct
  misc_feature 1..16: note = Description of Artificial Sequence: Synthetic oligonucleotide
  source 1..16: mol_type = other DNA
tgcgcgacattccgaa

SEQ ID NO: 41 - DNA, 16 bp, synthetic construct
  misc_feature 1..16: note = Description of Artificial Sequence: Synthetic oligonucleotide
  source 1..16: mol_type = other DNA
aatttgcccccagcgc

SEQ ID NO: 42 - DNA, 16 bp, synthetic construct
  misc_feature 1..16: note = Description of Artificial Sequence: Synthetic oligonucleotide
  source 1..16: mol_type = other DNA
gcgcgacattccgaag

SEQ ID NO: 43 - DNA, 16 bp, synthetic construct
  misc_feature 1..16: note = Description of Artificial Sequence: Synthetic oligonucleotide
  source 1..16: mol_type = other DNA
caatttgcccccagcg

SEQ ID NO: 44 - DNA, 16 bp, synthetic construct
  misc_feature 1..16: note = Description of Artificial Sequence: Synthetic oligonucleotide
  source 1..16: mol_type = other DNA
cgcgacattccgaaga

SEQ ID NO: 45 - DNA, 16 bp, synthetic construct
  misc_feature 1..16: note = Description of Artificial Sequence: Synthetic oligonucleotide
  source 1..16: mol_type = other DNA
acaatttgcccccagc

SEQ ID NO: 46 - DNA, 16 bp, synthetic construct
  misc_feature 1..16: note = Description of Artificial Sequence: Synthetic oligonucleotide
  source 1..16: mol_type = other DNA
gcgacattccgaagaa

SEQ ID NO: 47 - DNA, 16 bp, synthetic construct
  misc_feature 1..16: note = Description of Artificial Sequence: Synthetic oligonucleotide
  source 1..16: mol_type = other DNA
cacaatttgcccccag

SEQ ID NO: 48 - DNA, 16 bp, synthetic construct
  misc_feature 1..16: note = Description of Artificial Sequence: Synthetic oligonucleotide
  source 1..16: mol_type = other DNA
cgacattccgaagaac

SEQ ID NO: 49 - DNA, 16 bp, synthetic construct
  misc_feature 1..16: note = Description of Artificial Sequence: Synthetic oligonucleotide
  source 1..16: mol_type = other DNA
tcacaatttgccccca

SEQ ID NO: 50 - DNA, 16 bp, synthetic construct
  misc_feature 1..16: note = Description of Artificial Sequence: Synthetic oligonucleotide
  source 1..16: mol_type = other DNA
gacattccgaagaacg

SEQ ID NO: 51 - DNA, 16 bp, synthetic construct
  misc_feature 1..16: note = Description of Artificial Sequence: Synthetic oligonucleotide
  source 1..16: mol_type = other DNA
ttcacaatttgccccc

SEQ ID NO: 52 - DNA, 16 bp, synthetic construct
  misc_feature 1..16: note = Description of Artificial Sequence: Synthetic oligonucleotide
  source 1..16: mol_type = other DNA
acattccgaagaacgc

SEQ ID NO: 53 - DNA, 16 bp, synthetic construct
  misc_feature 1..16: note = Description of Artificial Sequence: Synthetic oligonucleotide
  source 1..16: mol_type = other DNA
tagccaaacaggaaca

SEQ ID NO: 54 - DNA, 16 bp, synthetic construct
  misc_feature 1..16: note = Description of Artificial Sequence: Synthetic oligonucleotide
  source 1..16: mol_type = other DNA
gccagcaatctgagga

SEQ ID NO: 55 - RNA, 24 nt, synthetic construct
  misc_feature 1..24: note = Description of Artificial Sequence: Synthetic oligonucleotide
  source 1..24: mol_type = other RNA
tttgcccccagcgcttcagcgttc

SEQ ID NO: 56 - RNA, 21 nt, synthetic construct
  misc_feature 1..21: note = Description of Artificial Sequence: Synthetic oligonucleotide
  source 1..21: mol_type = other RNA
tttcgtggtattgctagttac

SEQ ID NO: 57 - RNA, 20 nt, synthetic construct
  misc_feature 1..20: note = Description of Artificial Sequence: Synthetic oligonucleotide
  source 1..20: mol_type = other RNA
caatctgaggagaggccata

SEQ ID NO: 58 - RNA, 20 nt, synthetic construct
  misc_feature 1..20: note = Description of Artificial Sequence: Synthetic oligonucleotide
  source 1..20: mol_type = other RNA
aatctgaggagaggccatac

SEQ ID NO: 59 - RNA, 20 nt, synthetic construct
  misc_feature 1..20: note = Description of Artificial Sequence: Synthetic oligonucleotide
  source 1..20: mol_type = other RNA
atctgaggagaggccatact

SEQ ID NO: 60 - RNA, 20 nt, synthetic construct
  misc_feature 1..20: note = Description of Artificial Sequence: Synthetic oligonucleotide
  source 1..20: mol_type = other RNA
tctgaggagaggccatactt

SEQ ID NO: 61 - RNA, 20 nt, synthetic construct
  misc_feature 1..20: note = Description of Artificial Sequence: Synthetic oligonucleotide
  source 1..20: mol_type = other RNA
ctgaggagaggccatacttg

SEQ ID NO: 62 - RNA, 20 nt, synthetic construct
  misc_feature 1..20: note = Description of Artificial Sequence: Synthetic oligonucleotide
  source 1..20: mol_type = other RNA
tgaggagaggccatacttgt

SEQ ID NO: 63 - RNA, 20 nt, synthetic construct
  misc_feature 1..20: note = Description of Artificial Sequence: Synthetic oligonucleotide
  source 1..20: mol_type = other RNA
gaggagaggccatacttgtt

SEQ ID NO: 64 - RNA, 20 nt, synthetic construct
  misc_feature 1..20: note = Description of Artificial Sequence: Synthetic oligonucleotide
  source 1..20: mol_type = other RNA
aggagaggccatacttgttc

SEQ ID NO: 65 - RNA, 20 nt, synthetic construct
  misc_feature 1..20: note = Description of Artificial Sequence: Synthetic oligonucleotide
  source 1..20: mol_type = other RNA
ggagaggccatacttgttcc

SEQ ID NO: 66 - RNA, 20 nt, synthetic construct
  misc_feature 1..20: note = Description of Artificial Sequence: Synthetic oligonucleotide
  source 1..20: mol_type = other RNA
gagaggccatacttgttcct

SEQ ID NO: 67 - RNA, 20 nt, synthetic construct
  misc_feature 1..20: note = Description of Artificial Sequence: Synthetic oligonucleotide
  source 1..20: mol_type = other RNA
agaggccatacttgttcctg

SEQ ID NO: 68 - RNA, 20 nt, synthetic construct
  misc_feature 1..20: note = Description of Artificial Sequence: Synthetic oligonucleotide
  source 1..20: mol_type = other RNA
gaggccatacttgttcctgt

SEQ ID NO: 69 - RNA, 20 nt, synthetic construct
  misc_feature 1..20: note = Description of Artificial Sequence: Synthetic oligonucleotide
  source 1..20: mol_type = other RNA
aggccatacttgttcctgtt

SEQ ID NO: 70 - RNA, 20 nt, synthetic construct
  misc_feature 1..20: note = Description of Artificial Sequence: Synthetic oligonucleotide
  source 1..20: mol_type = other RNA
ggccatacttgttcctgttt

SEQ ID NO: 71 - RNA, 20 nt, synthetic construct
  misc_feature 1..20: note = Description of Artificial Sequence: Synthetic oligonucleotide
  source 1..20: mol_type = other RNA
gccatacttgttcctgtttg

SEQ ID NO: 72 - RNA, 20 nt, synthetic construct
  misc_feature 1..20: note = Description of Artificial Sequence: Synthetic oligonucleotide
  source 1..20: mol_type = other RNA
ccatacttgttcctgtttgg

SEQ ID NO: 73 - RNA, 20 nt, synthetic construct
  misc_feature 1..20: note = Description of Artificial Sequence: Synthetic oligonucleotide
  source 1..20: mol_type = other RNA
catacttgttcctgtttggc

SEQ ID NO: 74 - RNA, 20 nt, synthetic construct
  misc_feature 1..20: note = Description of Artificial Sequence: Synthetic oligonucleotide
  source 1..20: mol_type = other RNA
atacttgttcctgtttggct

SEQ ID NO: 75 - RNA, 20 nt, synthetic construct
  misc_feature 1..20: note = Description of Artificial Sequence: Synthetic oligonucleotide
  source 1..20: mol_type = other RNA
tacttgttcctgtttggcta

SEQ ID NO: 76 - RNA, 41 nt, synthetic construct
  misc_feature 1..41: note = Description of Artificial Sequence: Synthetic oligonucleotide
  source 1..41: mol_type = other RNA
taatttctactaagtgtagattaggtcaacatgcagctaca

SEQ ID NO: 77 - RNA, 50 nt, synthetic construct
  misc_feature 1..50: note = Description of Artificial Sequence: Synthetic oligonucleotide
  source 1..50: mol_type = other RNA
gccaccccaaaaatgaaggggactaaaacataggtcaacatgcagctaca

SEQ ID NO: 78 - RNA, 50 nt, synthetic construct
  misc_feature 1..50: note = Description of Artificial Sequence: Synthetic oligonucleotide
  source 1..50: mol_type = other RNA
gccaccccaaaaatgaaggggactaaaacagtaggtcaacatgcagctac

SEQ ID NO: 79 - RNA, 50 nt, synthetic construct
  misc_feature 1..50: note = Description of Artificial Sequence: Synthetic oligonucleotide
  source 1..50: mol_type = other RNA
gccaccccaaaaatgaaggggactaaaacaggtcaacatgcagctacagg

SEQ ID NO: 80 - RNA, 40 nt, synthetic construct
  misc_feature 1..40: note = Description of Artificial Sequence: Synthetic oligonucleotide
  source 1..40: mol_type = other RNA
gacgaatgaaggaatgcaactaggtcaacatgcagctaca

SEQ ID NO: 81 - RNA, 40 nt, synthetic construct
  misc_feature 1..40: note = Description of Artificial Sequence: Synthetic oligonucleotide
  source 1..40: mol_type = other RNA
gacgaatgaaggaatgcaacgtaggtcaacatgcagctac

SEQ ID NO: 82 - RNA, 40 nt, synthetic construct
  misc_feature 1..40: note = Description of Artificial Sequence: Synthetic oligonucleotide
  source 1..40: mol_type = other RNA
gacgaatgaaggaatgcaacggtcaacatgcagctacagg

SEQ ID NO: 83 - skipped

SEQ ID NO: 84 - DNA, 33 bp, synthetic construct
  misc_feature 1..33: note = Description of Artificial Sequence: Synthetic oligonucleotide
  source 1..33: mol_type = other DNA
agactccatatggagtctagccaaacaggaaca

SEQ ID NO: 85 - DNA, 33 bp, synthetic construct
  misc_feature 1..33: note = Description of Artificial Sequence: Synthetic oligonucleotide
  source 1..33: mol_type = other DNA
cgactccatatggagtcgaaagcaatctgagga

SEQ ID NO: 86 - DNA, 29 bp, synthetic construct
  misc_feature 1..29: note = Description of Artificial Sequence: Synthetic oligonucleotide
  source 1..29: mol_type = other DNA
acaagtatgtgaggagaggccatacttgt

SEQ ID NO: 87 - protein, 1367 aa, synthetic construct
  REGION 1..1367: note = Description of Artificial Sequence: Synthetic polypeptide
MEKSLNDFIGLYSVSKTLRFELKPVSETLENIKKFHFLEEDKKKANDYKDVKKIIDNYHKYFIDDVLKNASFNWKKLEEAIREYNKNKSDDSALVAEQKKLGDAILKLFTSDKRYKALTAATPKELFESILPDWFGEQCNQDLNKAALKTFQKFTSYFTGFQENRKNVYSAEAIPTAVPYRIVNDNFPKFLQNVLIFKTIQEKCPQIIDEVEKELSSYLGKEKLAGIFTLESFNKYLGQGGKENQRGIDFYNQIIGGVVEKEGGINLRGVNQFLNLYWQQHPDFTKEDRRIKMVPLYKQILSDRSSLSFKIESIENDEELKNALLECADKLELKNDEKKSIFEEVCDLFSSVKNLDLSGIYINRKDINSVSRILTGDWSWLQSRMNVYAEEKFTTKAEKARWQKSLDDEGENKSKGFYSLTDLNEVLEYSSENVAETDIRITDYFEHRCRYYVDKETEMFVQGSELVALSLQEMCDDILKKRKAMNTVLENLSSENKLREKTDDVAVIKEYLDAVQELLHRIKPLKVNGVGDSTFYSVYDSIYSALSEVISVYNKTRNYITKKAASPEKYKLNFDNPTLADGWDLNKEQANTSVILRKDGMFYLGIMNPKNKPKFAEKYDCGNESCYEKMIYKQFDATKQIPKCSTQKKEVQKYFLSGATEPYILNDKKSFKSELIITKDIWFMNNHVWDGEKFVPKRDNETRPKKFQIGYFKQTGDFDGYKNALSNWISFCKNFLQSYLSATVYDYNFKNSEEYEGLDEFYNYLNATCYKLNFINIPETEINKMVSEGKLYLFQIYNKDFASGSTGMPNMHTLYWKNLFSDENLKNVCLKLNGEAELFYRPAGIKEPVIHKEGSYLVNRTTEDGESIPEKIYFEIYKNANGKLEKLSDEAQNYISNHEVVIKKAGHEIIKDRHYTEPKFLFHVPLTINFKASGNSYSINENVRKFLKNNPDVNIIGLDRGERHLIYLSLINQKGEIIKQFTFNEVERNKNGRTIKVNYHEKLDQREKERDAARKSWQAIGKIAELKEGYLSAVIHQLTKLMVEYNAVVVMEDLNFGFKRGRFHVEKQVYQKFEHILIDKSNYLVFKDRGLNEPGGVLNGYQIAGQFESFQKLGKQSGMLFYVPAGYTSKIDPKTGFVSMMNFKDLTNVHKKRDFFSKFDNIHYDEANGSFVFTFDYKKFDGKAKEEMKLTKWSVYSRDKRIVYFAKTKSYEDVLPTEKLQKIFESNGIDYKSGNNIQDSVMAIGADLKEGAKPSKEISDFWDGLLSNFKLILQMRNSNARTGEDYIISPVMADDGTFFDSREEFKKGEDAKLPLDADANGAYHIALKGLSLINKINLSKDEELKKFDMKISNADWFKFAQEKNYAK

SEQ ID NO: 88 - protein, 809 aa, synthetic construct
  REGION 1..809: note = Description of Artificial Sequence: Synthetic polypeptide
MIKNPSNRHSLPKVIISEVDHEKILEFKIKYEKLARLDRFEVKAMHYEGKEIVFDEVLVNGGLIEVEYQDDNKTLFVKVGEKSYSIRGKKVGGKQRLLEDRVSKTKVQLELSDGVVDNKGNLRKSRTERELIVADNIKLYSQIVGREVTTTKEIYLVKRFLAYRSDLLFYYSFVDNFFKVAGNEKELWKINFDDATSAQFMGYIPFMVNDNLKNDNAYLKDYVRNDVQIKDDLKKVQTIFSALRHTLLHFNYEFFEKLFNGEDVGFDFDIGFLNLLIENIDKLNIDAKKEFIDNEKIRLFGENLSLAKVYRLYSDICVNRVGFNKFINSMLIKDGVENQVLKAEFNRKFGGNAYTIDIHSNQEYKRIYNEHKKLVIKVSTLKDGQAIRRGNKKISELKEQMKSMTKKNSLARLECKMRLAFGFLYGEYNNYKAFKNNFDTNIKNSQFDVNDVEKSKAYFLSTYERRKPRTREKLEKVAKDIESLELKTVIANDTLLKFILLMFVFMPQELKGDFLGFVKKYYHDVHSIDDDTKEQEEDVVEAMSTSLKLKILGRNIRSLTLFKYALSSQVNYNSTDNIFYVEGNRYGKIYKKLGISHNQEEFDKTLVVPLLRYYSSLFKLMNDFEIYSLAKANPTAVSLQELVDDETSPYKQGNYFNFNKMLRDIYGLTSDEIKSGQVVFMRNKIAHFDTEVLLSKPLLGQTKMNLQRKDIVSFIEARGDIKELLGYDAINDFRMKVIHLRTKMRVYSDKLQTMMDLLRNAKTPNDFYNVYKVKGVESINKHLLEVLAQTAEERTVEKQIRDGNEKYDL

SEQ ID NO: 89 - protein, 839 aa, synthetic construct
  REGION 1..839: note = Description of Artificial Sequence: Synthetic polypeptide
LNSIEKIKKPSNRNSIPSIIISDYDENKIKEIKVKYLKLARLDKITIQDMEIRDNIVEFKKILLNGIEHTIKDNQKIEFDNYEITAYVRASKQRRDGKITQAKYVVTITDKYLRDNEKEKRFKSTERELPNDTLLMRYKQISGFDTLTSKDIYKIKRYIDFKNEMLFYFQFIEEFFSPLLPKGTNFYSLNIEQNKDKVVKYIVYRLNDDFKNQSLNQFIKKTDTIKYDFLKIQKILSDFRHALAHFDFDFIQKFFDDELDKNRFDISTISLIKTMLQEKEEKYYQEKNNYIEDSDTLTLFDEKESNFSKIHNFYIKISQKKPAFNKLINSFLSKDGVPNEELKSYLATKKIDFFEDIHSNKEYKKIYIKHKNLVVEKQKEESQEKPNGQKLKNYNDELQKLKDEMNKITKQNSLNRLEVKLRLAFGFIANEYNYNFKNFNDKFTLDVKKEQKIKVFKNSSNEKLKEYFESTFIEKRFFHFCVKFFNKKTKKEETKQKNIFNLIENETLEELVKESPLLQIITLLYLFIPKELQGEFVGFILKIYHHTKNITNDTKEDEKSIEDTQNSFSLKLKILAKNLRGLQLFNYSLSHNTLYNTKEHFFYEKGNRWQSVYKSLEISHNQDEFDIHLVIPVIKYYINLNKLIGDFEIYALLTYADKNSITEKLSDITKRDDLKFRGYYNFSTLLFKTFMINTNYEQNQKSTQYIKQTRNDIAHQNIENMLKAFENNEIFAQREEIVNYLQKEHKMQEILHYNPINDFTMKTVQYLKSLNIHSQKESKIADIHKKESLVPNDYYLIYKLKVIELLKQKVIEAIGETKDEEKIKNAIAKEEQIKKGYNK

SEQ ID NO: 90 - protein, 840 aa, synthetic construct
  REGION 1..840: note = Description of Artificial Sequence: Synthetic polypeptide
MLKHKRKNKNSLARVVLSNYDSNNIYEIKIKYEKLAKLDKINIIEMDYDADNNVMFKKVLFNNKEIDLSHKDKTKINIELDNKKYNISAKKQIGKTHLVVRNKQTSKISRIKKIQDTYYRGKDVFILDNNIEILDKKQTKDKFIVTLNDITNNKTTSTEAELIDDTKDIFKKISAKKDLKSSDIYKIKRFISIRSNFSFYYTFVDNYFKIFHAKKDKNKEELYKIKFKDEINIKPYLENILDNMKNKNGILYNYANDRKKVLNDLRNIQYVFKEFRHKLAHFDYNFLDNFFSNSVEEKYKQKVNEIKLLDILLDNIDSLNVVPKQNYIEDETISVFDAKDIKLKRLYTYYIKLTINYPGFKKLINSFFIQDGIENQELKEYINNKEKDTQVLKELDNKAYYMDISQYRKYKNIYNKHKELVSEKELSSDGKKINSLNQKINKLKIDMKNITKPNALNRLIYRLRVAFGFIYKEYATINNFNKSFLQDTKTKRFENISQQDIKSYLDISYQDKGKFFVKSKKTFKNKTTVKYTFEDLDLTLNEIITQDDIFVKVIFLFSIFMPKELNGDFFGFINMYYHKMKNISYDTKDIDMLDTISQNMKLKILEQNIKKTYVFKYYLDLDSSIYSKLVQNIKITEDIDSKKYLYAKIFKYYQHLYKLISDVEIYLLYKYNSKENLSITIDKDELKHRGYYNFQSLLIKNNINKDDAYWSIVNMRNNLSHQNIDELVGHFCKGCLRKSTTDIAELWLRKDILTITNEIINKIESFKDIKITLGYDCVNDFTQKVKQYKQKLKASNERLAKKIEEKQNQVVDEKNKEELEKNILNMKNIQKINRYILDIL

SEQ ID NO: 91 - protein, 840 aa, synthetic construct
  REGION 1..840: note = Description of Artificial Sequence: Synthetic polypeptide
MLKHKRKNKNSLARVVLSNYDSNNIYEIKIKYEKLAKLDKINIIEMDYDADNNVMFKKVLFNNKEIDLSHKDKTKINIELDNKKYNISAKKQIGKTHLVVRDKQTSKISRIKKIQDTYYRGKDVFILDNNIEILDKKQTKDKFIVTLNDITNDKTTSTEAELIDDTKDIFKKISAKKDLKSSDIYKIKRFISIRSNFSFYYTFVDNYFKIFHAKKDKNKEELYKIKFKDEINIKPYLENILDNMKNKNGILYDYADDREKVLNDLKNIQYVFTEFRHKLAHFDYNFLDNFFSNSVTDQYKQKVNEIKLLDILLDNIDSLNVVPKQNYIEDETISVFDAKDIKLKRLYTYYIKLTINYPGFKKLINSFFIQDGIENQELKEYINNKEKDTQVLKELDNKAYYMDISQYRKYKNIYNKHKELVSEKELSSDGQKINSLNQKINKLKIEMKNITKPNALNRLIYRLRVAFGFIYKEYATINNFNKSFLQDTKIKRFENISQQDIKNYLDISYQDKGKFFVKSKKTFKNKTTIKYTFEDLDLTLNEIITQDDIFVKVIFLFSIFMPKELNGDFFGFINMYYHKMKNISYDTKDIDMLDTISQNMKLKILEQNIKKTYVFKYYLDLDSSIYSKLVQNIKITEDIDSKKYLYAKIFKYYQHLYKLISDVEIYLLYKYNSKENLSITIDKDELKHRGYYNFQSLLIKNNINKDDAYWSIVNMRNNLSHQNIDELVGHFCKGCLRKSTTDIAELWLRKDILTITNEIINKIESFKDIKITLGYDCVNDFTQKVKQYKQKLKASNERLAKKIEEKQNQVVDEKNKEELEKKILNMKNIQKINRYILDIL

SEQ ID NO: 92 - protein, 849 aa, synthetic construct
  REGION 1..849: note = Description of Artificial Sequence: Synthetic polypeptide
MSQLKNPSNKNSLPRIIISDFNEIKINEIKIKYHKLDRLDKIIVKEMEIINNKIFFKKILFNNQIKDINSENIELENYILAGEVKPSNTKIILNRDGKEKSFIVYDGFTFKYKPNDKRISETKTNAKYILTIKDKTRHRESSTQRDILKSSIIETYKQISGFENITSKDIYTIKRYIDFKNEMMFYYTFIDDFFFPITGKNKQDKKNNFYNYKIKENAKKFISLINYRINDDFKNKNGILYDYLSNKEEIIINDFIHIQTILKDVRHAIAHFNFDFIQKLFDNEQAFNSKFDGIEILNILFNQKQEKYFEAQTNYIEEETIKILDEKELSFKKLHSFYSQICQKKPAFNKLINSFIIQDGIENKELKDYISQKYNSKFDYYLDIHTCKIYKDIYNQHKKFVADKQFLENQKTDGQKIKKLNDQINQLKTKMNNLTKKNSLKRLEIKFRLAFGFIFTEYQTFKNFNERFIEDIKANKYSTKIELLDYGKIKEYISITHEEKRFFNYKTFNKKTNKNINKTIFQSLEKETFENLVKNDNLIKMMFLFQLLLPRELKGEFLGFILKIYHDLKNIDNDTKPDEKSLSELNISTALKLKILVKNIRQINLFNYTISNNTKYEEKEKRFYEEGNQWKDIYKKLYISHDFDIFDIHLIIPIIKYNINLYKLIGDFEVYLLLKYLERNTNYKTLDKLIEAEELKYKGYYNFTTLLSKAINIALNDKEYHNITHLRNNTSHQDIQNIISSFKNNKLLEQRENIIELISKESLKKKLHFDPINDFTMKTLQLLKSLEVHSDKSEKIENLLKKEPLLPNDVYLLYKLKGIEFIKKELISNIGITKYEEKIQEKIAKGVEK

SEQ ID NO: 93 - protein, 822 aa, synthetic construct
  REGION 1..822: note = Description of Artificial Sequence: Synthetic polypeptide
MVKNPANRHALPKVIISEVDNNNILEFKIKYEKLARLDKVEVKSMHFDNNKQVVFDEVVINGGLIEPTYEDKHKKLVVTAGEKSYSIVGQKVGGKPRLLEDRVSKTKVQLELTNYVEDKEGKKRVSKTERELIVADNIELYSQIVGREVKTTKEIYLIKRFLEYRSDLLFYYGFVDNFFKVAGNGKELWKIDFTNSDSLHLIEYFKFSINDNLKNDENYLKNYVSDNTKIENDLVKCQNNFNSLRHALMHFDYDFFEKLFNGEDVGFDFDIEFLNIMIDKVDKLNIDTKKEFIDDEEVTLFGEALSLKKLYGLFSHIAINRVAFNKLINSFIIEDGIENKELKDFFNNKKESQAYEIDIHSNAEYKALYVQHKKLVMATSAMTDGDEIAKKNQEISDLKEKMKVITKENSLARLEHKLRLAFGFIYTEYKDYKTFKKHFDQDIKGAKYKGLNVEKLKEYYETTLKNSKPKTDEKLEDVAKKIDKLSLKELIDDDTLLKFVLLLFIFMPQELKGDFLGFIKKYYHDKKHIDQDTKDKDTEIEELSTGLKLKVLDKNIRSLSILKHSFSFQVKYNRKDKNFYEDGNLHGKFYKKLSISHNQEEFNKSVYAPLFRYYSALYKLINDFEIYALAQHVENHETLADQVNKSQFIQKSYFNFRKLLDNTDSISQSSSYNTLIVMRNDISHLSYEPLFNYPLDERKSYKKKTQKGVKTFHVELLYISRAKIIELISLQTDMKKLLGYDAVNDFNMKVVHLRKRLSVYANKEESIRKMQADAKTPNDFYNIYKVKGVESINQHLLKVIGVTEAEKSIEKQINEGNKKHNT

SEQ ID NO: 94 - protein, 806 aa, synthetic construct
  REGION 1..806: note = Description of Artificial Sequence: Synthetic polypeptide
MTKKPSNRNSLPKVIINKVDESSILEFKIKYEKLARLDRFEVRSMRYDGDGRIIFDEVVANAGLLDVDYEDDNRTIVVKIENKAYNIYGKKVGGEKRLNGKISKAKVQLILTDSIRKNANDTHRHSLTERELINKNEVDLYSKIAEREISTTKDIYLVKRFLAYRSDLLLYYAFINHYVRVNGNKKEFWKTEIDDKIIDYFIYTINDTLKNKEGYLEKYIVDRDQIKKDLEKIKQIFSHLRHKLMHYDFRFFTDLFDGKDVDIKVDNSIQKISELLDIEFLNIVIDKLEKLNIDAKKEFIDDEKITLFGQEIELKKLYSLYAHTSINRVAFNKLINSFLIKDGVENKELKEYFNAHNQGKESYYIDIHQNQEYKKLYIEHKNLVAKLSATTDGKEIAKINRELADKKEQMKQITKANSLKRLEYKLRLAFGFIYTEYKDYERFKNSFDTDTKKKKFDAIDNAKIIEYFEATNKAKKIEKLEEILKGIDKLSLKTLIQDDILLKFLLLFFTFLPQEIKGEFLGFIKKYYHDITSLDEDTKDKDDEITELPRSLKLKIFSKNIRKLSILKHSLSYQIKYNKKESSYYEAGNVFNKMFKKQAISHNLEEFGKSIYLPMLKYYSALYKLINDFEIYALYKDMDTSETLSQQVDKQEYKRNEYFNFETLLRKKFGNDIEKVLVTYRNKIAHLDFNFLYDKPINKFISLYKSREKIVNYIKNHDIQAVLKYDAVNDFVMKVIQLRTKLKVYADKEQTIESMIQNTQNPNGFYNIYKVKAVENINRHLLKVIGYTESEKAVEEKIRAGNTSKS

SEQ ID NO: 95 - protein, 832 aa, synthetic construct
  REGION 1..832: note = Description of Artificial Sequence: Synthetic polypeptide
MIKNPSNRYALPKVIISKIDNQNILEFKIKYKKLSKLDIVKVKSMHYDDRAIIFDEVIVNDGLIDVEYRDNHKTIFVKVGNKSYSISGQKVGGKERLLENRVSKTKVQLELKDKATNRVSKTERELIVDDNIKIYSQIVGRDVKTTKDIYLIKRFLAYRSDLLFYYGFVNNFFHVANNRSEFWKIDFNDSNNSKLIEYFKFTINDHLKNDENYLKDYISDNEKLKNDLIKVKNSFEKIRHALMHFDYDFFVKLFNGEDVGLELDIEFLDIMIDKLDKLNIDTKKEFIDDEKITIFGEELSLAKLYRFYAHTAINRVAFNKLINSFIIENGVENQSLKEYFNQQAGGIAYEIDIHQNREYKNLYNEHKKLVSRVLSISDGQEIAILNQKIAKLKDQMKQITKANSIKRLEYKLRLALGFIYTEYENYEEFKNNFDTDIKNGRFTPKDNDGNKRAFDSRELEQLKGYYEATIQTQKPKTDEKIEEVSKKIDRLSLKSLIADDILLKFILLMFTFMPQELKGEFLGFIKKYYHDTKHIDQDTISDSDDTIETLSIGLKLKILDKNIRSLSILKHSLSFQTKYNKKDRNYYEDGNIHGKFFKKLGISHNQEEFNKSVYAPLFRYYSALYKLINDFEIYTLSLHIVGSETLTDQVNKSQFLSGRYFNFRKLLTQSYHINNNSTHSTIFNAVINMRNDISHLSYEPLFDCPLNGKKSYKRKIRNQFKTINIKPLVESRKIIIDFITLQTDMQKVLGYDAVNDFTMKIVQLRTRLKAYANKEQTIQKMITEAKTPNDFYNIYKVQGVEEINKYLLEVIGETQAEKEIREKIERGNIANF

SEQ ID NO: 96 - protein, 1281 aa, synthetic construct
  REGION 1..1281: note = Description of Artificial Sequence: Synthetic polypeptide
MKKSIFDQFVNQYALSKTLRFELKPVGETGRMLEEAKVFAKDETIKKKYEATKPFFNKLHREFVEEALNEVELAGLPEYFEIFKYWKRYKKKFEKDLQKKEKELRKSVVGFFNAQAKEWAKKYETLGVKKKDVGLLFEENVFAILKERYGNEEGSQIVDESTGKDVSIFDSWKGFTGYFIKFQETRKNFYKDDGTATALATRIIDQNLKRFCDNLLIFESIRDKIDFSEVEQTMGNSIDKVFSVIFYSSCLLQEGIDFYNCVLGGETLPNGEKRQGINELINLYRQKTSEKVPFLKLLDKQILSEKEKFMDEIENDEALLDTLKIFRKSAEEKTTLLKNIFGDFVMNQGKYDLAQIYISRESLNTISRKWTSETDIFEDSLYEVLKKSKIVSASVKKKDGGYAFPEFIALIYVKSALEQIPTEKFWKERYYKNIGDVLNKGFLNGKEGVWLQFLLIFDFEFNSLFEREIIDENGDKKVAGYNLFAKGFDDLLNNFKYDQKAKVVIKDFADEVLHIYQMGKYFAIEKKRSWLADYDIDSFYTDPEKGYLKFYENAYEEIIQVYNKLRNYLTKKPYSEDKWKLNFENPTLADGWDKNKEADNSTVILKKDGRYYLGLMARGRNKLFDDRNLPKILEGVENGKYEKVVYKYFPDQAKMFPKVCFSTKGLEFFQPSEEVITIYKNSEFKKGYTFNVRSMQRLIDFYKDCLVRYEGWQCYDFRNLRKTEDYRKNIEEFFSDVAMDGYKISFQDVSESYIKEKNQNGDLYLFEIKNKDWNEGANGKKNLHTIYFESLFSADNIAMNFPVKLNGQAEIFYRPRTEGLEKERIITKKGNVLEKGDKAFHKRRYTENKVFFHVPITLNRTKKNPFQFNAKINDFLAKNSDINVIGVDRGEKQLAYFSVISQRGKILDRGSLNVINGVNYAEKLEEKARGREQARKDWQQIEGIKDLKKGYISQVVRKLADLAIQYNAIIVFEDLNMRFKQIRGGIEKSVYQQLEKALIDKLTFLVEKEEKDVEKAGHLLKAYQLAAPFETFQKMGKQTGIVFYTQAAYTSRIDPVTGWRPHLYLKYSSAEKAKADLLKFKKIKFVDGRFEFTYDIKSFREQKEHPKATVWTVCSCVERFRWNRYLNSNKGGYDHYSDVTKFLVELFQEYGIDFERGDIVGQIEVLETKGNEKFFKNFVFFFNLICQIRNTNASELAKKDGKDDFILSPVEPFFDSRNSEKFGEDLPKNGDDNGAFNIARKGLVIMDKITKFADENGGCEKMKWGDLYVSNVEWDNFVANK

SEQ ID NO: 97 - protein, 1280 aa, synthetic construct
  REGION 1..1280: note = Description of Artificial Sequence: Synthetic polypeptide
MFNNFIKKYSLQKTLRFELKPVGETADYIEDFKSEYLKDTVLKDEQRAKDYQEIKTLIDDYHREYIEECLREPVDKKTGEILDFTQDLEDAFSYYQKLKENPTENRVGWEKEQESLRKKLVTSFVGNDGLFKKEFITRDLPEWLQKKGLWGEYKDTVENFKKFTTYFSGFHENRKNMYTAEAQSTAIANRLMNDNLPKFFNNYLAYQTIKEKHPDLVFRLDDALLQAAGVEHLDEAFQPRYFSRLFAQSGITAFNELIGGRTTENGEKIQGLNEQINLYRQQNPEKAKGFPRFMPLFKQILSDRETHSFLPDAFENDKELLQALRDYVDAATSEEGMISQLNKAMNQFVTADLKRVYIKSAALTSLSQELFHFFGVISDAIAWYAEKRLSPKKAQESFLKQEVYAIEELNQAVVGYIDQLEDQSELQQLLVDLPDPQKPVSSFILTHWQKSQEPLQAVIAKVEPLFELEELSKNKRAPKHDKDQGGEGFQQVDAIKNMLDAFMEVSHAIKPLYLVKGRKAIDMPDVDTGFYADFAEAYSAYEQVTVSLYNKTRNHLSKKPFSKDKIKINFDAPTLLNGWDLNKESDNKSIILRKDGNFYLAIMHPKHTKVFDCYSASEAAGKCYEKMNYKLLSGANKMLPKVFFSKKGIETFSPPQEILDLYKNNEHKKGATFKLESCHKLIDFFKRNIPKYKVHPTDNFGWDVFGFHFSPTSSYGDLSGFYREVEAQGYKLWFSDVSEAYINKCVEEGKLFLFQIYNKDFSPNSTGKPNLHTLYWKGLFEPENLKDVVLKLNGEAEIFYRKHSIKHEDKTIHRAKDPIANKNADNPKKQSVFDYDIIKDKRYTQDKFFFHVPISLNFKSQGVVRFNDKINGLLAAQDDVHVIGIDRGERHLLYYTVVNGKGEVVEQGSLNQVATDQGYVVDYQQKLHAKEKERDQARKNWSTIENIKELKAGYLSQVVHKLAQLIVKHNAIVCLEDLNFGFKRGRFKVEKQVYQKFEKALIDKLNYLVFKERGATQAGGYLNAYQLAAPFESFEKLGKQTGILYYVRSDYTSKIDPATGFVDFLKPKYESMAKSKVFFESFERIQWNQAKGYFEFEFDYKKMCPSRKFGDYRTRWVVCTFGDTRYQNRRNKSSGQWETETIDVTAQLKALFAAYGITYNQEDNIKDAIAAVKYTKFYKQLYWLLRLTLSLRHSVTGTDEDFILSPVADENGVFFDSRKATDKQPKDADANGAYHIALKGLWNLQQIRQHDWNVEKPKKLNLAMKNEEWFGFAQKKKFRA

SEQ ID NO: 98 - protein, 832 aa, synthetic construct; identical to SEQ ID NO: 95
  REGION 1..832: note = Description of Artificial Sequence: Synthetic polypeptide

SEQ ID NO: 99 - protein, 809 aa, synthetic construct; identical to SEQ ID NO: 88
  REGION 1..809: note = Description of Artificial Sequence: Synthetic polypeptide

SEQ ID NO: 100 - protein, 1285 aa, synthetic construct
  REGION 1..1285: note = Description of Artificial Sequence: Synthetic polypeptide
MEEKMLKSYDYFTKLYSLQKTLRFELKPIGKTLEHIKNSGIIESDETLEEQYAIVKNIIDKLHRKHIDEALSLVDFTKHLDTLKTFQELYLKRGKTDKEKEELEKLSADLRKLIVSYLKGNVKEKTQHNLNPIKERFEILFGKELFTNEEFFLLAENEKEKKAIQAFKGFTTYFKGFQENRKNMYSEEGNSTSIAYRIINENLPLFIENIARFQKVMSTIEKTTIKKLEQNLKTELKKHNLPGIFTIEYFNNVLTQEGISRYNTIIGGKTTHEGVKIQGLNEIINLYNQQSKDVKLPILKPLHKQILSEEYSTSFKIKAFENDNEVLKAIDTFWNEHIEKSIHPVTGNKFNILSKIENLCDQLQKYKDKDLEKLFIERKNLSTVSHQVYGQWNIIRDALRMHLEMNNKNIKEKDIDKYLDNDAFSWKEIKDSIKIYKEHVEDAKELNENGIIKYFSAMSINEEDDEKEYSISLIKNINEKYNNVKSILQEDRTGKSDLHQDKEKVGIIKEFLDSLKQLQWFLRLLYVTVPLDEKDYEFYNELEVYYEALLPLNSLYNKVRNYMTRKPYSVEKFKLNFNSPTLLDGWDKNKETANLSIILRKNGKYYLGIMNKENNTIFEYYPGTKSNDYYEKMIYKLLPGPNKMLPKVFFSKKGLEYYNPPKEILNIYEKGEFKKDKSGNFKKESLHTLIDFYKEAIAKNEDWEVFNFKFKNTKEYEDISQFYRDVEEQGYLITFEKVDANYVDKLVKEGKLYLFQIYNKDFSENKKSKGNPNLHTIYWKGLYDSENLKNVVYKLNGEAEVFYRKKSIDYPEEIYNHGHHKEELLGKFNYPIIKDRRYTQDKFLFHVPITMNFISKEEKRVNQLACEYLSATKEDVHIIGIDRGERHLLYLSLIDKEGNIKKQLSLNTIKNENYDKEIDYRVKLDEKEKKRDEARKNWDVIENIKELKEGYMSQVIHIIAKMMVEEKAILIMEDLNIGFKRGRFKVEKQVYQKFEKMLIDKLNYLVFKNKNPLEPGGSLNAYQLTSKFDSFKKLGKQSGFIFYVPSAYTSKIDPTTGFYNFIQVDVPNLEKGKEFFSKFEKIIYNTKEDYFEFHCKYGKFVSEPKNKDNDRKTKESLTYYNAIKDTVWVVCSTNHERYKIVRNKAGYYESHPVDVTKNLKDIFSQANINYNEGKDIKPIIIESNNAKLLKSIAEQLKLILAMRYNNGKHGDDEKDYILSPVKNKQGKFFCTLDGNQTLPINADANGAYNIALKGLLLIEKIKKQQGKIKDLYISNLEWFMFMMSR

SEQ ID NO: 101 - protein, 1367 aa, synthetic construct; identical to SEQ ID NO: 87
  REGION 1..1367: note = Description of Artificial Sequence: Synthetic polypeptide

SEQ ID NO: 102 - protein, 1366 aa, synthetic construct
  REGION 1..1366: note = Description of Artificial Sequence: Synthetic polypeptide
MNTQKKEFNPKSFKDFTNLYSLNKTLRFSLTPNKKTAEILEFNKQKEVKCFSNDRKIAGAYQEIKKYLNKLHQEFIQEAMKFFAFSEEELKGFEKEYLNLLNFTDKDNFKKKNKIRNEYEQERKILTIKIATYFSKFKSEKYQSFNLANITGKKVFSILEQKYKEDKKTLKIIHIFKYKPTKDEKKEGEAVNFSTYLTGFNENRKNFYKSEDKAGQFATRTIDNLAQFIKNKKLFEDKYQKNYSKIGILDEQIKIFNLDYFNNLFLQEGLDEYNGILGNNKGEENKSNEGINQKINIFKQKEKARLKKEKENFNKSDFPLFKELYKQIGSIRKENDVYVEIKTDKELVEELNNFPKNVENYLKDIQSFYKTFFEKLQNEEYELDKIYLPKSVGTYFSYIAFSDWNKLAFIYNKRYKNEKIKIVEGGDVNVQYRSLEVLKNRIDELKDEDNLNFNKFFIDKLKFNEAKKENNWQNFWFCIEYYINSQFIGGEKNILNKEKNEYEILPFGSLKELKEKYFEAVKKYKEKMVDTESGLTDDEEKEIKETLKNYLDRIKEIERIAKYFDLKKSFEEIKQEDLDSNFYGEYQKVVDKTNELKIYQYYSEFRNYLTQNNSVEEKIKLNFNSGLLLDGWDLNKEKVKFSIIFQENGKYYLGIINKEKDKTILDKDKHPEIFTKNSDFRKMEYKLFPSPSKMLPKISFSETAKKGDEDVGWSEEIQKIKDEFAEFQEYKKKSKDNWKDEFNRGKLNKLIDYYKQVLEKHSEGYMNTYNFELKDSSKYKNLGEFNDDIARQNYKVKFVGIDKNYIDEKVANGELFLFQIYNKDFSEDKKEGSTNNLETIYFKELFSKENLENPVFKLSGGAEMFFRNKIEKKKEKKKLDKDGKPMISKKGEKVVDKRRFSENKILFHLPIEINYGKGKMPNFNKKINEYISKNPENIKIIGIDRGEKHLLYYSIIDQNGNNIESMSLNAVDEFGNFVNPEKLEEYEIDNNGKKERRWKYIVNDKEIKVTNYQRKLDELEKERQKSRQSWQNINKIKNLKKGYISFVVKKIVDLAIENNAIIILEDLNFGFKSFRQKIEKNVYQQFEKALIDKLGFVVDKQKQNQRFAPQLSAPFESFQKIGKQTGIVYYVLANNTSKVCPSCQWIKNFYLKYEKKNTIFNLQKNQKLKVFFEQEKNRFRFEYQMSKEYISVYSDVDRQRYDKTKNQNKGGYLEYKNSNQKEIIDKDGVIQKQSITLQLKELFKENHIDLEKEILKQLDNKKEKNSGYTGVYNKFIYLFNLILQIRNAISFREKDYIQCPSCHFDTRKENYLKINDGDGNGAYNIALRGLYLLKGKNGIINNLEKIKLIFSNNDYFQWAKKLKNKK

SEQ ID NO: 103 - protein, 1275 aa, synthetic construct
  REGION 1..1275: note = Description of Artificial Sequence: Synthetic polypeptide
MQNKQSFADFTNLYSLSKTLRFELKPIGQTQAMLDENKIFEVDENRKKAYDKTKPYFDRLHREFINESLSNAQLKGISEYFETFKQFRSNQNNKDLKELINKQQKFLRHQIVTLFDENGKHWATTKYAHLKIKKKNLDILFDEQVFYILKERYGSEKETQLVDKETGAVTSIFDNWKGFTGYFTKFFETRKNFYKSDGTSTALATRIIDQNLNRFFDNLETFHKIKDKIDVKEVEIFFKLKADNVFSIDFYNQCLLQNGIDKYNDFLGGQTLENGEKQKGINEIINKYRQDNKDQKLPFLKKLDKQILSEKDRFINEIESKEEFFQVLTEFYQSATVKVTIIKTLLNDFVHNTDKYKLEKIYLTKEAFNTIANKWTDETQIFEDNLDLVLKNKKITAKQDFIPLAYIKEALEVIEKDRKFFKDRYYNDPQIGFFPDQSYWEQFLAILNFEFMTHFQRVAKDKITGKKIELGYFVFEKRIKELLDSDPSLNSQSKIIIKEFADEVLHIFQMAKYFALEKKREWKGDYYQLDDQFYNHIDYGFKDQFYENAYEKIVQPYNKIRNYLTKKPYSDVKWKLNFGNPTLANGWDKNKEADNTAVILKKDGNYYLGVMKKGKNKIFSDQNKEKYKAYNSAYYEKLVYKLFPDPSKMFPKVCFSKKGLNFFQPSEEILRIYKNNEFKKGNTFSISSMQKLIAFYIDCLGLYEGWKHYEFKNIKDVRQYKENIGEFYADVAESGYKLWFEKISEEYITQKNQLGELFLFQIYNKDFAKKTTGRKNLHTIYFEELFSQTNIDNNFPFKLNGQAELFYRPKSLEKIEEKRNFKRSIVNKKRYTQNKIFFHVPITLNRTSENIGRFNVRVNNFLANNSNVNIVGVDRGEKNLAYYSIIKQNGEVLKSGSLNIINGVDYHALLTDRAQRREQERRNWQDVESIKDLKRGYISQVVHELVSLAIKYNAIIVMEDLNMRFKQIRGGIEKSTYQQLEKALIEKLNFLVNKEETDSNQAGNLLNAYQLTAPFKTFKDMGKQTGIIFYTQASYTSKIDPLTGWRPNIYLRYSNAKQAKADILMFTNIYFSEKKDRFEFTYDLEKIDDKRKDLPIKTEWTVCSNVERFSWEKSLNNNKGGYVHYPIQDSNGEESITSKLKKLFMDFGIDLTDIKTQIESLDTNKKDNANFFRKFIFYFQLICQIRNTQVNKSDDGNDFIFSPVEPFFDSRFADKFRKNLPKNGDENGAYNIARKGLIILHKISDYFVKEGSTDKISWKDLSISQTEWDNFTTDK

SEQ ID NO: 104 - protein, 1368 aa, synthetic construct
  REGION 1..1368: note = Description of Artificial Sequence: Synthetic polypeptide
MKKEKEFKSFGDFTNLYEISKTLRFELKPVENTQTMLDEADVFGKDKVIKDKYTKTKPFIDKLHREFVDESLKDVSLSGLKKYSEVLENWKKNKKDKDIVKELKKEEERLRKEVVEFFDNTAKKWANEKYKELGLKKKDIGILFEESVFDLLKEKYGEEQDSFLKEEKGDFLKNEKGEKVSIFDEWKGFVGYFTKFQETRKNFYKNDGTETALATRIIDQNLKRFCDNIDDFKKIKNKIDFSEVEKNFNKTADVFSLDFYNQCLLQKGIDSYNEFIGGKTLENGKKLKGVNELVNEYRQKNKNEKVSFLKLLDKQILSEKEKLSFGIENDEQLLVVLNSFYETAEEKTKILRTLFGDFVEHNENYDLDKTYISKVAFNTISHKWTNETHKFEELLYGAMKEDKPIGLNYDKKEDSYKFPDFIALGYLKKCLNNLDCDTKFWKEKYYENNADKKDKDKGFLTGGQNAWDQFLQIFIFEFNQLFNSEAFDNKGKEIKIGYDNFRKDFEEIINQKDFKNDENLKIAIKNFADSVLWIYQMAKYFAIEKKRGWDDDFELSEFYTNPSNGYSLFYDRAYEEIVQKYNDLRNYLTKKPYKEDKWKLNFENPTLANGFDKNKESDNSTVILRKKRKYYLGLMKKGNNKIFEDRNKAEFIRNIESGAYEKMAYKYLPDVAKMIPKCSTQLNEAKNHFRNSADDLEIKKSFSNPLKITKRIFDLNNIQYDKTNVSKKISGDNKGIKIFQKEYYKISGDFDVYKSALNDWIDFCKDFLSKYDSTKDFDFSILRKTKDYKSLDEFYVDVAKITYKISFTPVSESYIDQKNKNGELYLFEIYNQDFAKGKMGAKNLHTLYFENVFSPENISKNFPIKLNGNAELFFRPKSIESKKEKRNFVREIVNKKRYSEDKIFFHCPITLNRETGSIYRFNNYVNNFLSENNINIIGVDRGEKHLAYYSVIDKNGVKIGGGSFNEINKVDYAKKLEERAGEREQSRKDWQVVEGIKDLKKGYISQVVRELADLAIKHNAIIVLEDLNMRFKQIRGGIEKSIYQQLEKALIDKLSFLVEKGEKDPNQAGHILKAYQLAAPFTSFKDMGKQTGIVFYTQASYTSKTCPNCGFRKNNNKFYFENNIGKAQDALKKLKTFEYDSENKCFGLSYCLSDFANKEEVEKNKNKKRNNAPYSDIEKKDCFELSTKDAVRYRWHDKNTERGKTFFEGESVYEEKEEKEIGQTKRGLVKEYDISKCLIGLFEKTGLDYKQNLLDKINSGKFDGTFYKNLFNYLNLLFEIRNSISGTEIDYISCPECQFHTDKSKTIKNGDDNGSYNIARKGMIILDKIKQFKKENGSLDKMGWGELFIDLEEWDKFAQKKNNNIIDK

SEQ ID NO: 105 - protein, 1257 aa, synthetic construct
  REGION 1..1257: note = Description of Artificial Sequence: Synthetic polypeptide
MKYTDFTGIYSVSKTLRFELIPQGSTVENMKREGILNNDMHRADSYKEMKKLIDEYHKAFIERCLSDFSLKYDDTGKHDSLEEYFFYYEQKRNDKTKKIFEDIQVALRKQISKRFTGDTAFKRLFKKELIKEDLPSFVKNDPVKTELIKEFSDFTTYFQEFHKNRKNMYTSDAKSTAIAYRIINENLPKFIDNINAFDIVAKVPEMQEHFKTIADELRSHLQVGNDIDKMFNLQFFNKVLTQSQLDVYNAVIGGKSEGNKKIQGINEYINLYNQQHKKARLPMLKLLYKQILSDRVAISWLQDEFDNDQDMLDTIEAFYNKLNSNETGVLGEGKLKQILMGLDGYNLDGVFMRNDLQLSEVSQRLCGGWNIIKDAMTSDLKRSVQKKKKETDADFEERVSKLFSAQNSFSIAYINQCLGQAGIRCKIQDYFACLGAKEGENEAETTPDIFDQIAEAYHGAAPILNARPSSHNLAQDIEKVKAIKALLDALKRLQRFVKPLLGRGDEGDKDNFFYGDFMPIWEVLDQLTPLYNKVRNRMTRKPYSQEKIKLNFENSTLLNGWDLNKEHDNTSVILRREGLYYLGIMNKNYNKIFDANNVETIGDCYEKMIYKLLPGPNKMLPKVFFSKSRVQEFSPSKKILEIWESKSFKKGDNFNLDDCHALIDFYKDSIAKHPDWNKFNFKFSDTQSYTNISDFYRDVNQQGYSLSFTKVSVDYVNRMVDEGKLYLFQIYNKDFSPQSKGTPNMHTLYWRMLFDERNLHNVIYKLNGEAEVFYRKASLRCDRPTHPAHQPITCKNENDSKRVCVFDYDIIKNRRYTVDKFMFHVPITINYKCTGSDNINQQVCDYLRSAGDDTHIIGIDRGERNLLYLVIIDQHGTIKEQFSLNEIVNEYKGNTYCTNYHSLLEEKEAGNKKARQDWQTIESIKELKEGYLSQVIHKISMLMQRYHAIVVLEDLNGSFMRSRQKVEKQVYQKFEHMLINKLNYLVNKQYDATEPGGLLHALQLTSRMDSFKKLGKQSGFLFYIPAWNTSKIDPVTGFVNLFDTRYCNEAKAKEFFEKFDDISYNDERDWFEFSFDYRHFTNKPTGTRTQWTLCTQGTRVRTFRNPEKSNHWDNEEFDLTQAFKDLFNKYGIDIASGLKARIVNGQLTKETSAVKDFYESLLKLLKLTLQMRNSVTGTDIDYLVSPVADKDGIFFDSRTCGSLLPANADANGAFNIARKGLMLLRQIQQSSIDAEKIQLAPIKNEDWLEFAQEKPYL

SEQ ID NO: 106 - protein, 766 aa, synthetic construct
  REGION 1..766: note = Description of Artificial Sequence: Synthetic polypeptide
MEKEITELTKIRREFPNKKFSSTDMKKAGKLLKAEGPDAVRDFLNSCQEIIGDFKPPVKTNIVSISRPFEEWPVSMVGRAIQEYYFSLTKEELESVHPGTSSEDHKSFFNITGLSNYNYTSVQGLNLIFKNAKAIYDGTLVKANNKNKKLEKKFNEINHKRSLEGLPIITPDFEEPFDENGHLNNPPGINRNIYGYQGCAAKVFVPSKHKMVSLPKEYEGYNRDPNLSLAGFRNRLEIPEGEPGHVPWFQRMDIPEGQIGHVNKIQRFNFVHGKNSGKVKFSDKTGRVKRYHHSKYKDATKPYKFLEESKKVSALDSILAIITIGDDWVVFDIRGLYRNVFYRELAQKGLTAVQLLDLFTGDPVIDPKKGVVTFSYKEGVVPVFSQKIVPRFKSRDTLEKLTSQGPVALLSVDLGQNEPVAARVCSLKNINDKITLDNSCRISFLDDYKKQIKDYRDSLDELEIKIRLEAINSLETNQQVEIRDLDVFSADRAKANTVDMFDIDPNLISWDSMSDARVSTQISDLYLKNGGDESRVYFEINNKRIKRSDYNISQLVRPKLSDSTRKNLNDSIWKLKRTSEEYLKLSKRKLELSRAVVNYTIRQSKLLSGINDIVIILEDLDVKKKFNGRGIRDIGWDNFFSSRKENRWFIPAFHKAFSELSSNRGLCVIEVNPAWTSATCPDCGFCSKENRDGINFTCRKCGVSYHADIDVATLNIARVAVLGKPMSGPADRERLGDTKKPRVARSRKTMKRKDISNSTVEAMVTA

SEQ ID NO: 107 - protein, 717 aa, synthetic construct
  REGION 1..717: note = Description of Artificial Sequence: Synthetic polypeptide
MIKPTVSQFLTPGFKLIRNHSRTAGLKLKNEGEEACKKFVRENEIPKDECPNFQGGPAIANIIAKSREFTEWEIYQSSLAIQEVIFTLPKDKLPEPILKEEWRAQWLSEHGLDTVPYKEAAGLNLIIKNAVNTYKGVQVKVDNKNKNNLAKINRKNEIAKLNGEQEISFEEIKAFDDKGYLLQKPSPNKSIYCYQSVSPKPFITSKYHNVNLPEEYIGYYRKSNEPIVSPYQFDRLRIPIGEPGYVPKWQYTFLSKKENKRRKLSKRIKNVSPILGIICIKKDWCVFDMRGLLRTNHWKKYHKPTDSINDLFDYFTGDPVIDTKANVVRFRYKMENGIVNYKPVREKKGKELLENICDQNGSCKLATVDVGQNNPVAIGLFELKKVNGELTKTLISRHPTPIDFCNKITAYRERYDKLESSIKLDAIKQLTSEQKIEVDNYNNNFTPQNTKQIVCSKLNINPNDLPWDKMISGTHFISEKAQVSNKSEIYFTSTDKGKTKDVMKSDYKWFQDYKPKLSKEVRDALSDIEWRLRRESLEFNKLSKSREQDARQLANWISSMCDVIGIENLVKKNNFFGGSGKREPGWDNFYKPKKENRWWINAIHKALTELSQNKGKRVILLPAMRTSITCPKCKYCDSKNRNGEKFNCLKCGIELNADIDVATENLATVAITAQSMPKPTCERSGDAKKPVRARKAKAPEFHDKLAPSYTVVLREAV

SEQ ID NO: 108 - protein, 766 aa, synthetic construct
  REGION 1..766: note = Description of Artificial Sequence: Synthetic polypeptide
MEKEITELTKIRREFPNKKFSSTDMKKAGKLLKAEGPDAVRDFLNSCQEIIGDFKPPVKTNIVSISRPFEEWPVSMVGRAIQEYYFSLTKEELESVHPGTSSEDHKSFFNITGLSNYNYTSVQGLNLIFKNAKAIYDGTLVKANNKNKKLEKKFNEINHKRSLEGLPIITPDFEEPFDENGHLNNPPGINRNIYGYQGCAAKVFVPSKHKMVSLPKEYEGYNRDPNLSLAGFRNRLEIPEGEPGHVPWFQRMDIPEGQIGHVNKIQRFNFVHGKNSGKVKFSDKTGRVKRYHHSKYKDATKPYKFLEESKKVSALDSILAIITIGDDWVVFDIRGLYRNVFYRELAQKGLTAVQLLDLFTGDPVIDPKKGVVTFSYKEGVVPVFSQKIVPRFKSRDTLEKLTSQGPVALLSVDLGQNEPVAARVCSLKNINDKITLDNSCRISFLDDYKKQIKDYRDSLDELEIKIRLEAINSLETNQQVEIRDLDVFSADRAKANTVDMFDIDPNLISWDSMSDARVSTQISDLYLKNGGDESRVYFEINNKRIKRSDYNISQLVRPKLSDSTRKNLNDSIWKLKRTSEEYLKLSKRKLELSRAVVNYTIRQSKLLSGINDIVIILEDLDVKKKFNGRGIRDIGWDNFFSSRKENRWFIPAFHKTFSELSSNRGLCVIEVNPAWTSATCPDCGFCSKENRDGINFTCRKCGVSYHADIDVATLNIARVAVLGKPMSGPADRERLGDTKKPRVARSRKTMKRKDISNSTVEAMVTA

SEQ ID NO: 109 - protein, 718 aa, synthetic construct
  REGION 1..718: note = Description of Artificial Sequence: Synthetic polypeptide
VPDKKETPLVALCKKSFPGLRFKKHDSRQAGRILKSKGEGAAVAFLEGKGGTTQPNFKPPVKCNIVAMSRPLEEWPIYKASVVIQKYVYAQSYEEFKATDPGKSEAGLRAWLKATRVDTDGYFNVQGLNLIFQNARATYEGVLKKVENRNSKKVAKIEQRNEHRAERGLPLLTLDEPETALDETGHLRHRPGINCSVFGYQHMKLKPYVPGSIPGVTGYSRDPSTPIAACGVDRLEIPEGQPGYVPPWDRENLSVKKHRRKRASWARSRGGAIDDNMLLAVVRVADDWALLDLRGLLRNTQYRKLLDRSVPVTIESLLNLVTNDPTLSVVKKPGKPVRYTATLIYKQGVVPVVKAKVVKGSYVSKMLDDTTETFSLVGVDLGVNNLIAANALRIRPGKCVERLQAFTLPEQTVEDFFRFRKAYDKHQENLRLAAVRSLTAEQQAEVLALDTFGPEQAKMQVCGHLGLSVDEVPWDKVNSRSSILSDLAKERGVDDTLYMFPFFKGKGKKRKTEIRKRWDVNWAQHFRPQLTSETRKALNEAKWEAERNSSKYHQLSIRKKELSRHCVNYVIRTAEKRAQCGKVIVAVEDLHHSFRRGGKGSRKSGWGGFFAAKQEGRWLMDALFGAFCDLAVHRGYRVIKVDPYNTSRTCPECGHCDKANRDRVNREAFICVCCGYRGNADIDVAAYNIAMVAITGVSLRKAARASVASTPLESLAAE

SEQ ID NO: 110 - protein, 757 aa, synthetic construct
  REGION 1..757: note = Description of Artificial Sequence: Synthetic polypeptide
MPKPAVESEFSKVLKKHFPGERFRSSYMKRGGKILAAQGEEAVVAYLQGKSEEEPPNFQPPAKCHVVTKSRDFAEWPIMKASEAIQRYIYALSTTERAACKPGKSSESHAAWFAATGVSNHGYSHVQGLNLIFDHTLGRYDGVLKKVQLRNEKARARLESINASRADEGLPEIKAEEEEVATNETGHLLQPPGINPSFYVYQTISPQAYRPRDEIVLPPEYAGYVRDPNAPIPLGVVRNRCDIQKGCPGYIPEWQREAGTAISPKTGKAVTVPGLSPKKNKRMRRYWRSEKEKAQDALLVTVRIGTDWVVIDVRGLLRNARWRTIAPKDISLNALLDLFTGDPVIDVRRNIVTFTYTLDACGTYARKWTLKGKQTKATLDKLTATQTVALVAIDLGQTNPISAGISRVTQENGALQCEPLDRFTLPDDLLKDISAYRIAWDRNEEELRARSVEALPEAQQAEVRALDGVSKETARTQLCADFGLDPKRLPWDKMSSNTTFISEALLSNSVSRDQVFFTPAPKKGAKKKAPVEVMRKDRTWARAYKPRLSVEAQKLKNEALWALKRTSPEYLKLSRRKEELCRRSINYVIEKTRRRTQCQIVIPVIEDLNVRFFHGSGKRLPGWDNFFTAKKENRWFIQGLHKAFSDLRTHRSFYVFEVRPERTSITCPKCGHCEVGNRDGEAFQCLSCGKTCNADLDVATHNLTQVALTGKTMPKREEPRDAQGTAPARKTKKASKSKAPPAEREDQTPAQEPSQTS

SEQ ID NO: 111 - protein, 761 aa, synthetic construct
  REGION 1..761: note = Description of Artificial Sequence: Synthetic polypeptide
MSNKTTPPSPLSLLLRAHFPGLKFESQDYKIAGKKLRDGGPEAVISYLTGKGQAKLKDVKPPAKAFVIAQSRPFIEWDLVRVSRQIQEKIFGIPATKGRPKQDGLSETAFNEAVASLEVDGKSKLNEETRAAFYEVLGLDAPSLHAQAQNALIKSAISIREGVLKKVENRNEKNLSKTKRRKEAGEEATFVEEKAHDERGYLIHPPGVNQTIPGYQAVVIKSCPSDFIGLPSGCLAKESAEALTDYLPHDRMTIPKGQPGYVPEWQHPLLNRRKNRRRRDWYSASLNKPKATCSKRSGTPNRKNSRTDQIQSGRFKGAIPVLMRFQDEWVIIDIRGLLRNARYRKLLKEKSTIPDLLSLFTGDPSIDMRQGVCTFIYKAGQACSAKMVKTKNAPEILSELTKSGPVVLVSIDLGQTNPIAAKVSRVTQLSDGQLSHETLLRELLSNDSSDGKEIARYRVASDRLRDKLANLAVERLSPEHKSEILRAKNDTPALCKARVCAALGLNPEMIAWDKMTPYTEFLATAYLEKGGDRKVATLKPKNRPEMLRRDIKFKGTEGVRIEVSPEAAEAYREAQWDLQRTSPEYLRLSTWKQELTKRILNQLRHKAAKSSQCEVVVMAFEDLNIKMMHGNGKWADGGWDAFFIKKRENRWFMQAFHKSLTELGAHKGVPTIEVTPHRTSITCTKCGHCDKANRDGERFACQKCGFVAHADLEIATDNIERVALTGKPMPKPESERSGDAKKSVGARKAAFKPEEDAEAAE

SEQ ID NO: 112 - protein, 708 aa, synthetic construct
  REGION 1..708: note = Description of Artificial Sequence: Synthetic polypeptide
MSKTKELNDYQEALARRLPGVRHQKSVRRAARLVYDRQGEDAMVAFLDGKEVDEPYTLQPPAKCHILAVSRPIEEWPIARVTMAVQEHVYALPVHEVEKSRPETTEGSRSAWFKNSGVSNHGVTHAQTLNAILKNAYNVYNGVIKKVENRNAKKRDSLAAKNKSRERKGLPHFKADPPELATDEQGYLLQPPSPNSSVYLVQQHLRTPQIDLPSGYTGPVVDPRSPIPSLIPIDRLAIPPGQPGYVPLHDREKLTSNKHRRMKLPKSLRAQGALPVCFRVFDDWAVVDGRGLLRHAQYRRLAPKNVSIAELLELYTGDPVIDIKRNLMTFRFAEAVVEVTARKIVEKYHNKYLLKLTEPKGKPVREIGLVSIDLNVQRLIALAIYRVHQTGESQLALSPCLHREILPAKGLGDFDKYKSKFNQLTEEILTAAVQTLTSAQQEEYQRYVEESSHEAKADLCLKYSITPHELAWDKMTSSTQYISRWLRDHGWNASDFTQITKGRKKVERLWSDSRWAQELKPKLSNETRRKLEDAKHDLQRANPEWQRLAKRKQEYSRHLANTVLSMAREYTACETVVIAIENLPMKGGFVDGNGSRESGWDNFFTHKKENRWMIKDIHKALSDLAPNRGVHVLEVNPQYTSQTCPECGHRDKANRDPIQRERFCCTHCGAQRHADLEVATHNIAMVATTGKSLTGKSLAPQRLQEAAE

SEQ ID NO: 113 - protein, 661 aa, synthetic construct
  REGION 1..661: note = Description of Artificial Sequence: Synthetic polypeptide
VAFLDGKEVDEPYTLQPPAKCHILAVSRPIEEWPIARVTMAVQEHVYALPVHEVEKSRPETTEGSRSAWFKNSGVSNHGVTHAQTLNAILKNAYNVYNGVIKKVENRNAKKRDSLAAKNKSRERKGLPHFKADPPELATDEQGYLLQPPSPNSSVYLVQQHLRTPQIDLPSGYTGPVVDPRSPIPSLIPIDRLAIPPGQPGYVPLHDREKLTSNKHRRMKLPKSLRAQGALPVCFRVFDDWAVVDGRGLLRHAQYRRLAPKNVSIAELLELYTGDPVIDIKRNLMTFRFAEAVVEVTARKIVEKYHNKYLLKLTEPKGKPVREIGLVSIDLNVQRLIALAIYRVHQTGESQLALSPCLHREILPAKGLGDFDKYKSKFNQLTEEILTAAVQTLTSAQQEEYQRYVEESSHEAKADLCLKYSITPHELAWDKMTSSTQYISRWLRDHGWNASDFTQITKGRKKVERLWSDSRWAQELKPKLSNETRRKLEDAKHDLQRANPEWQRLAKRKQEYSRHLANTVLSMAREYTACETVVIAIENLPMKGGFVDGNGSRESGWDNFFTHKKENRWMIKDIHKALSDLAPNRGVHVLEVNPQYTSQTCPECGHRDKANRDPIQRERFCCTHCGAQRHADLEVATHNIAMVATTGKSLTGKSLAPQRLQ

SEQ ID NO: 114 - protein, 845 aa, synthetic construct
  REGION 1..845: note = Description of Artificial Sequence: Synthetic polypeptide
MIKKPSNRHALPKVIISKVDNQNILEFKIKYKKLSRLDRVEIKTMHYDDRAIVFDEVIINGGLIDVEYRDNHKTIFVKVGDKSYSISGQKVGGKERLLENRISQTKVQLELKDEATNRVSKTERELIVDDNIKLYSQIVGRDVKTTKDIYLIKRFLGYRSDLLFYYGFVNNFFHVANNRPEFWKIDFNDNRNSKLIEYFIFTINDHLKNDENYLKDYISDRGQIVDDLENIKHIFSALRHGLMHFDYDFFEALFNGEDIDIKMDNQGNTQPLSSLNIKFLDIMIDKLDKLNIDTKKEFIDAEKITIFGEELSLAKLYRFYAHTAINRVAFNKLINSFIIENGVENQSLKEYFNQQAGGIAYEIDIHQNREYKNLYNEHKKLVSRVLSISDGQEIATLNQKIVELKEQMKQITKINSIKRLEYKLRLAFGFIYTEYKNYEEFKNSFDTDIKNGRFTPKDEDGNKRAFDSRELEHLKGYYKATLQTQKPQTDEKMEEVSKRVDRLSLKSLIGDDTLLKFILLMFTFMPQELKGEFLGFIKKYYHDTKHIDQDTISDSDDTIEEGLSIGLKLKILDKNIRSLSILKHSLSFQTKYNKKDRSYYEDGNIHGKFFKKLGISHNQEEFNKSVYAPLFRYYSALYKLINDFEIYTLSLHIVGNETLSDQVNKPQFLSGRYFNFRKLLTQSYNISNNSTHSVIFNAVINMRNDISHLSYEPLLDCPLNGKKSYKRKIRNQFRTINIKPLVESRKMIIDFITLQTDMQKVLGCDAVNDFTMKIVQLRTRLKAYANKEQTIEKMITEAKTPNDFYNIYKVKGVEAINKYLLEVIGETQVEKEIREEIERGNIANS

SEQ ID NO: 115 - protein, 802 aa, synthetic construct
  REGION 1..802: note = Description of Artificial Sequence: Synthetic polypeptide
MLKKPSNRYALPKVILSTVDHEKILEFKVKYEKLARLDRLVVERMHFDGESVVFDEVIANSGDLEIAYQDDHRKLLIQAAGKSYTITGKKVGGKKRKLEERISRAKIQLTLTDGQEDQHRRIRATVTEKALLEPKEDRDIYSKISDRKIKTSKEIYLVKRFLSYRSDLLFYYFFVDNFFKVGNNKQELWKIKFQNQPELIEYFRFIINDRFKNAKNDKFDNYLKNDKAIQEDLEKIQKVFEKLRHALMHYDYGFFEKLFGGEDQGFDLDIAFLDNFVKKIDKLNIDTKKEFVDDEKIKIFGEDLNLADLYKLYASISINRVGFNRVVNEMIIKDGIEKSELKRAFEKKLDKTYALDIHSDPSYKKLYNEHKRLVTEVSTYTDGNKIKEGNQKIAKLKYEMKEITKKNALVRLECKMRLAFGLIYGRYDTHEAFKNGFDTDLKRGEFAQIGSEEAIGYFNTTFEKSKPKSKEEIKKIARQIDNLSLSTLIEDDPLMKFIVLMFLFVPRELKGEFLGFWRKYYHDIHSIDSDAKSDEMPDEVSLSLKLKILTRNIRRLNLFEYSLSEKIKYSPKNTQFYTDKSPYQKVYKRLKISHNKEEFDKTLLVPLFRYYSILFKLINDFEIYSLAKANPDASSLSELTKTKHGFRGHYNFTTLMMDAHKVSQGDSKKHFGIRGEIAHINTKDLIYDPLFRKSKMAQQRNDVIDFVLKYEKEIKAVLGYDAINDFRMKVVQLRTKLKVYSDKTQTIEKLLNEVEAPDDFYVLYKVKGVEAINKYLLEIVSVTQAEEEIERKIITGNKRYNT

SEQ ID NO: 116 - protein, 1281 aa, synthetic construct
  REGION 1..1281: note = Description of Artificial Sequence: Synthetic polypeptide
MIKSYDDFTKLYSLQKTLRFELKPIGKTLEHIKKSEIIESDETLEEQYAIVKNIIDRFHRKHIDEALSLVDFTKHLDTFKTIQELYLKRGKTDREKKELEELSADLRKLIVSYLKGNVKQKTQHNLNPIKERFEILFGKELFTNEEFFTLAENKEEKKAIQAFKGFTTYFKGFQENRKNMYSEEDKSTAIAYRIINENMPLFIENIARFQKVLDVIEKTKLTELKQNLKTELKGHSVSDIFRIEYFNNVLTQEGISRYNTIIGGKTTTEGVKIQGLNEIINLHNQQSKDVKLPILKPLHKQILSEEYSTSFKIKAFENDNEVLKAIDTFWNEHIEKSIHPVTGKRFNILLKIENLCKKLEKYKDKEIEKLFIERKNLSTVSHQVYGQWNIIRDALRMHLEMNNKNIKEKDIDKYLDNDAFAWKEIKDSIKIYKEHVEDAKELDENGIVKYFSSMSINEEDDEKEYSISLIKNINEKYNNVKSILEEDRTGKSDLHQDKEKVAIIKEFLDSLKQLQWFLKLLYVTVPLDEKDYEFYNELEVYYEALLPLNSLYNKVRNYMTRKPYSVEKFKLNFYSPTLLDGWDKNKETANLSIILKKNGKYYLGIMNKENNTIFENFPKSKSNDYYEKMIYKLLPGPNKMLPKVFFSKKGLEYYKPSKEILRIYEKGEFKKDKSGNFKKESLHTLIDFYKEAIAKNEDWKIFKFKFKNTREYEDISQFYRDVEEQGYLIIFEKVDANYVDKLVEEGELYLFQIYNKDFSENKKSKGNPNLHTIYWESLFDNQNLKDVVYKLNGEAEVFYRKKSIDYPEEIYNNGHHKEELNGKFNYPIIKDRRYTQDKFLFHVPITMNFISKEEKRVNQLACEYLSTTKEDVHIIGIDRGERHLLYLSLIDKEGNIKKQLSLNTIKNENYDKEIDYRVKLDEKEKKRDEARKNWDVIENIKELKEGYMSQVIHIIAKMMAEEKAILIMEDLNIGFKRGRFKVEKQVYQKFEKMMIDKLNYLVFKNKEPLEPGGSLNAYQLTSKFDSFKKLGKQSGFIFYVPSAYTSKIDPTTGFYNFIRVDVPNLEKGKEFFSKFEKIIYNTKEDYFEFHCKYGKFVPEPKNKDNDRKTKESLTYYNAIKDTVWVVCSTHHERYKIVRNKAGYYESQPVDVTKNLRDIFSEANINYSDGKDIKPIIIESNNAKLLKSIAEQLKLILAMRYNNGKHDDDEKDYILSPVKNKQGKFFCSLDGDQSLPINADANGAYNIALKGLLLIEKIKKQQGKAKDLYISNLEWFMFMMSR

SEQ ID NO: 117 - protein, 1281 aa, synthetic construct; identical to SEQ ID NO: 116
  REGION 1..1281: note = Description of Artificial Sequence: Synthetic polypeptide

SEQ ID NO: 118 - protein, 1332 aa, synthetic construct
  REGION 1..1332: note = Description of Artificial Sequence: Synthetic polypeptide
MKSIFDNFTGLYSLSKTLRFELRPVGQTLENIKNGHFLESDKKMADDYQDVKKIIDNYHKFFIDDVLKGASFDWALLEKELTDFNKNKTDDSKVEAEQKKLREQIAKTLAGDKRFKSLTASTPNDLFNKDKDFIGWLEQSSVKEIRKDALDTFKKFSSYFKGFQENRKNVYSADDIPTAVPYRIVNDNFPKFLQNISIFKTIQEKCPQVIADVENELASYLGKEKLADIFTVQAFNKYLCQGGKENQRGIDFYNQVIGGIAEKEGGVNLRGINQFLNLYWQQHPDFAKENRRIKMVPLYKQILSDRSSLSFKIETIDTDEELKTAISEYADKLESKSNDEKKSVLDVCVELFDSIKEQNLQEIYVNRKDINNISRILTGDWSWLQSRMNLYADEVFTTKAEKTRWQKSVDGDEGENKSKGAYSLAELNRVLEYASENVAETDIRITDYFCHRNRFYYEKESGLFKQGEELVALSIKESCEDILSKRKAMNEAFANISESNSLRDNSEDIAKTKTYLDSVQDLLHRIKPLKVNGLGDPSFYAVFDSIYSALSEVISIYNKTRNYITRKAESPEKYKLNFDNPTLANGWDLNKEKDNTCVLLRKNGMYYLGIMNPKDKPKFAEKYDCGTESCYEKMIYKLLPGPNKMLPKVFFSTKGKKQYNPPENILHGYEQGKHKKGVAFDINFCHELIDWFKSAINQHEDWKKFGFKFSDTKSYKDISDFYREVTEQGYKLTFINIPESEISKMVSEGKLYLFQIYNMDFAPGANGMPNMHTLYWKNLFSEENLKDVVLKLNGEAELFYRPAGIKEPVVHAKGSYLVNRITKDGEPIPEKIHDEIYRNANGNLNNLSKEASEYKESHKVVIKQASHEIIKDRHYTEPKFLFHIPLTINFKAPSMKPTVCTAIQNENVRRFLKNNPDVNIIGLDRGERNLIYLSLINQKGEIIKQFSFNDVEREQNGQTVKVNYHEKLDQREKERDAARKSWQAIGKIAELKEGYLSAVIHQLTKLMVEYNAIVVMEDLNFGFKRGRFHVEKQVYQKFEHMLIDKLNYLVFKDRGLNEPGGALNGYQLAGQFESFQKLGKQSGMLFYVPAAYTSKIDPKTGFVSMMNFKDLTNVHKKRDFFSKFEDIHFDEATCSFVFTFDYKNFNGKAKEEMKQTKWAVYSREKRIVYFSKTKSSEDIMPTEKLRALFESDGIEYKSGNNIHDSVMAVGADLKEGAKPSKEIADFWDGLLYNFKLILQMRNSNAKTGEDYIISPVMASDGTFFDSRVEAKKGKDAKLPLDADANGAYHIALKGLSLINKINLAGEDELKKFDMKISNEDWFNFAQEKKYAE

SEQ ID NO: 119 - protein, 1345 aa, synthetic construct
  REGION 1..1345: note = Description of Artificial Sequence: Synthetic polypeptide
MTKQNKSVTQNTKRKNFGEFTNLYSLSKTLRFELKPVKATKTILEVERKDRENFKKDRKIAKNYQKLKGILNELHQEFIQDVMREFSFQEKEIKEFEERYLEALNFKEKDNYKKRTQLKNAYEKVAKKLAGKIATAFGKYNQEKYGVKFTKKNLTGENVFDILEGKYKGDKKILGIIHTFKFKPTKEEKKQGKEAVNFSTYLGGFNQNRENFYKGEMKAGQFATRTIENLIQFLKNKKLFIDKYKDNYQKIGFSQEQVEIFNLNYFNNLFLQEGLDVYNGILGAKKGEKNTENDGLNQKINLFKQKEKTRCKANGEKFNKSDYPIFKELYKQIGSIKKDNDVYVEIKSDEELVNVLQSLPEKTANTLREVQKFYENFFDKIFNDEFDLDKIYLPKSVGTHFSHLAFSDWSKLAFVFNKRWRNEKVKIKEGEDVNVQSRSLADIKKRMEEILEMDGGVSFGKTYCQKVGLEKEARTIEDVWSGFWKIIQYHINSQFIGGEKEVFDKEKKDDKTEKIQTIDDLQEEYLQATEMYRERMVESEEGLNDGEEKEIKTKLKNYLDRIKDIERIARYFDLRKHFDDIDEASKDGDFYFIYQELLQDISEAKINDHYNEIRNYLTKANVVDDKFKLNFNDGQTLSGWDLNKETEKFSLIFKRKVDGGVEYYLGIINKEKNKTIFDKKKHPEIFTENSEFEKMEYKLFPSPSKMLPKIAFTKNKEGERIKPVFLDENAGKEIAQIKKEFALFQDAKKEDKNKWSDEFDRKKLNKLIDYYKLVLEKHPEKYMQTFNFVFKSSAKYKNLGEFNDDVARQNYVTKFVSVDKDYIDQKVESGELYLFKIHNKDWNLTKAGDTKKQSKKNLHTIYFEELFSEKNIAEPVFKLSGGAEVFFRDAIEKKKQKKKKDKKGKEILEKFRFTKNKILFHVPITINYGKPSINQGQFNQKINEFIADNSRSVNILGIDRGEKHLLYYSLVDNNGKIIKSGSLNEINGVDYHEKLDKAEKERQEARKSWQKINQIKNLKAGYISQVIKKIVDLAIENNAIIVLEDLNFGFKSFRQKIEKNVYQQFEKALIDKLGFVTDKEKLNHRQAPQLSAPFESFEKMGKQTGIVFYVLATNTSKVCPQCQWKKNIFPHYSTKKSIAENLQKQYKMKMYWRENENRFEFEYKGDGDKEFSSIFSNVDRVRYDKRANNNQGGYVIYQIDSTTKEKDGRNIKEKSITNLLKELLLEKFEIDNLEGELLVKLSEKSPDVSKETIKDFFGLLNSILNIRNSMTDTEEDYIQCPACGFDTRKENKIGIKNGDDNGAYNIALRGRFLIERIKKAKKEDKKPNLTFSNNDYFQWVREFVK

SEQ ID NO: 120 - protein, 1265 aa, synthetic construct
  REGION 1..1265: note = Description of Artificial Sequence: Synthetic polypeptide
MRTTTSLDAFTNRYALSKTLRFELKPIGNTQMMLEQNNVFAKDRAIREKYEKTKPWIDLLHREFVAESLQNAQLGNLDDYYAALQNVQKITKDTNAEDKKRWKKGFEKQEKRLRKEVVALFDKAAHIWATQRYPQLKKKTKDFLFEEGVFEHVLFARYGSAPDTTVKIVTSNPETGEVIDEREESIFKGWKGFTGYFDKFFETRKNFYKDNGTATAIATRAINQNLRRFAENMQKLTDIKNNYPELLAHTDFGDFDIAHAQSLDFYARTCLLQEGIDAYNKKFVGVLKSAINEYQQKNKGVRISYPKTLDNQILGERERRLFDVIEDDRELHDVFRAFVDDGTVFAAEMRQLAQAFSAQNGTYDYTQIYISKKGFETISRKYTHDTRAWHDALADVFKAKAKKRIATTASGEKKFPAYIPVAYITQALTLVQESEDTECTWKERYASITENKTLEEGFFAIFADEFERLFVHMEATVQDTDYVVAEDKAKKLLSDGQITKNEQTTQIIKEYADALLRIYQMAKYFAVEKKSMWDDAVAIDDTFYETFKEIYGNTHSTIVASYNLLRNYLTKKPWEDVQKWKLNFENPTLLDGWDKNKEAANFGVILRDGDKFYLGIMRKGHNNIFANQHHSNFEGQGLQKMVYKFFPDPKKMFPKVCFSAKGMEFFAPSEEIVRIYKNAEFKSGDTFNVESMQKLIDFYKNALQKYDGWKIYDFKHLKDTAQYTSNIGEFYDDVAKGGYQLGWQNISKEYVEEKNANGELYLFQIKNKDWNDGATGRKNLHTLYFEYLFSEKNAAADFVFRLNGGAEVFYRPAAIESKTERRGNREVAAKKRYTQDKVFLHVPITLNRTAGDVKTSAFNDAVNRFLAGNPDINIMGIDRGEKHLAYYSIIDQNGNRIVSGSFNTIGSKDYHALLTERQGAREEARKNWQRVEQIKDLKKGYISLVVREIADLAIKHNAIIVLENLNMRFKQIRGGIEKSVYQQLEKALIEKLNFLVNKGEVDATKAGHLLRAYQLAAPFETFEKMGNQTGIIFYTTASYTSQVDPVTGWRPHVYLKYRNAQKTKEDILRIFDDIVFNDEKQRFEFAYRHNGVSWTVCSSVERHRWNRSNNAGKGGYDVFPVEGEGSITQRLQEACAQRGIDTTRNILAQIDELDESASATVSFLRDLCFYFRLICQIRNTDDGADDINAQDFLMSPVEPFFDTRNAQEQYPQNGDENGAYNIARKGIIILQKITAWGRSQDTQRRYPDTFVSQDEWDTFLTQHTT

SEQ ID NO: 121 - protein, 1259 aa, synthetic construct
  REGION 1..1259: note = Description of Artificial Sequence: Synthetic polypeptide
MLKEKQFKTFGDFTNLYELSKTLRFELRPTPETKDLLDKNKIIQTDKKIAENYQEIKKYFDKLHKKFIKEALSNTQIDFSDFCKLWEQNSKDSGKIKDLSRKLRKSIKQAFDKKGADWHKRYLEKGIKLKKKNLDILFEERVLDILKEEFKDDVDVKLFESFKGFSTYFTNFHESRKNFYKDDGTASAIATRIIDENLKRFCDNIKVKKHSKKLISELNEREAKIFEADFYNRCLLQQGIDDYNQVIGDINKKINNLRQNKIENTPTLKILYKQILGDVRRQETEQDAFIEIKNNEEVFDFLQDFIKHSDENNKYFKNLFYKFIEGKHSLDKIFLAKRFVNTISGKWFASWEVFGAELIKKFGNKKDLPDFIPFAAVKDVLQNCNIPANELFKEKIKNDEDKNIYDIFINLWKEEFDSNLKKVEESKKEVENMIAEDKVYSNKKEKRKNDNGEEIEIEIQKEKIKNYADAAMNIFRMMKYFLLEKNGKTVEGMGEDNNFYNELNIVFKGGEIDGKVYEGVKTYLYYNEFRNYLTKKPFNEEKTKLNFDCGQILSGWDKNKESEKLGVILRKDNKYYLAIINKKHNKIFDVKKNSYAYIVGDNFYEKMEYKLFPDAKRMIPKIAFAKNNKEKFGWTDEIQKIKNEYAEFQEGKKNDKNLWKDKFNKNKMEKLITYYQNCLEKGGYKDIYNFRWKSPDKYSGIGEFNDEIDRQSYCLKFVKVDFNYVFEKVKSGELYLFQIYNKDFSDKADRAQKENIHTEYFKLLFDQRNLDNVVLKLSGGAEIFYRPKTEGLPKKKDNKGNEVVRHRRYADDKYFLHLPIQLNFGRGNLSGGEFNSKINQYLSEQREIKIIGIDRGEKHLAYYSVINQDGKIEEIESLNTVNGIDYRKKLDELEKKREQERKSWQSISKIKDLKKGYISHVIKKICDLAIEHNAIIVFEDLSGGFKNSRKKIEKQIYQNLELALATKLNYLTFKDKNFGESGHYLNAYQLAPKIDNYQDIKMQTGIVFYTPAGYTSSTCPQCGFRKTLKFDYTATISKAEDLIRGSKLNIVFEKEKNRFKINYLFNPIEKKKKKIKENELFADAGAKNEFTIYSDVKRIKWHNTGTKRLEEAEGERLLENKNSRGRDKEYDINKCLTRLFRENKIDVNGDIIGQITKIKSLKLYQDLFYYLFLATLIRNNVSGSDIDYIQCPSCHFHSDGGFQKQKFNGDANGAYNIARKGILILKKIKQFAAQDKDMKNFGWKHLTVDINEWDKFTQK

SEQ ID NO: 122 - protein, 1371 aa, synthetic construct
  REGION 1..1371: note = Description of Artificial Sequence: Synthetic polypeptide
MNKNFSNFTELYTLSKTLRFELKPVAQTKENIKKGKFLESDKKKADDYKDVKKIIDNYHKFFIDDVLKNASFDWTVLEKEMSDFNKSKADDSKVEAEQKKLRDQIAKKLTSDKRFKALTASTPSDLFNKDKDFIDWFTQNSTKDINKEALETFKRFSSYFKGFQENRKNVYSAEPIPTAVPYRLVNDNFPKFLQNIALFKIIQEKCPQVISDVEKELASYLGKEKLADIFTVQAFNKYLCQGGKENQRGIDFYNNILGGIAEKEGGINLRGINQFLNLYWQQHQDFAKQNKRIKMIPLFKQILSDRSSLSFKIESINTDQELLTSITEYADKLETKSNDEKKSVLDICSDLFASIKAQNLQEIYVNRKDINSISRILTGDWSWLQSRMNVYADEVFTTKAEKTRWQKSIDGDEGENKSKGVFSLAELNSVLEYSSENVSETDVRITDFFDHRNRFYYEKESGLFKQGDELVALSIRESCEDILAKRKAMDEAFANVSENNSLRDNSEDVAKIKIYLDCVQELLHRIKPLKVNGLGDPAFYAVFDTVYNSLSEVISLYNKTRNYITKKAANPEKYKLNFDNPTLADGWDLNKEQANTSVLMRKDGMYYLGIMNPKDKPKFAEKYECGNEACYEKMIYKQFDATKQIPKCSTQVKEVKKHFQSGATDSIILNDKSKFKLDLVITKEIWFLNNHVWNGEKFVPKRESNETRPKKFQIGYYKQTGDLGGYKEALNIWISFCKTFLQSYISSSIYDYDFKESSNYDSLDEFYNYLNATCYKLSFINIPEATISQMVSEGKLYLFQIYNKDFAPGASGMPNMHTLYWKNLFSEENLKNVVLKLNGEAELFYRPAGIKEPVIHAKGSYLVNRITKDGEPIPEKIHDEIYRNANGKLESLSKEATEYKASHKVVIKEAKHDIIKDRHYTEPKFLFHVPLTINFKASGNSYINENVRRFLKNNPDVNVIGLDRGERHLIYLSLINQKGEIIKQFTFNEVERNKNGQVIKVNYHEKLDQREKVRGAARKSWQAIGKIAELKEGYLSAVIHQLTKLMVEYNAIVVMEDLNFGFKRGRFHVEKQVYQKFEHMLIDKLNYLVFKDRGLTEAGGVLNGYQLAGQFESFQKLGKQSGMLFYVPAGYTSKIDPKTGFASMSNFKDLTNVHKKRAFFSKFDDIHFDDATGSFVFTFDYKNFDGKAKEEMKRTKWSVYSKDKRIVYLSKTKSYEDVQPTEKIKASLESVGIEYMSGNNLIDSIMVIGAELKDGAKPSKEIADFWDRLLYNFKLILQMRNSNAKTGEDYIISPVMADDGTFFDSREEFKKGENAKMPVDADANGAYHIALKGLSLLKRFDAASENELKKFDMKISNVDWFKFAQEKSYAE

SEQ ID NO: 123 - protein, 1160 aa, synthetic construct
  REGION 1..1160: note = Description of Artificial Sequence: Synthetic polypeptide
MKAKKSFYNQKRKFGKRGYRLHDERIAYSGGIGSMRSIKYELKDSYGIAGLRNRIADATISDNKWLYGNINLNDYLEWRSSKTDKQIEDGDRESSLLGFWLEALRLGFVFSKQSHAPNDFNETALQDLFETLDDDLKHVLDRKKWCDFIKIGTPKTNDQGRLKKQIKNLLKGNKREEIEKTLNESDDELKEKINRIADVFAKNKSDKYTIFKLDKPNTEKYPRINDVQVAFFCHPDFEEITERDRTKTLDLIINRFNKRYEITENKKDDKTSNRMALYSLNQGYIPRVLNDLFLFVKDNEDDFSQFLSDLENFFSFSNEQIKIIKERLKKLKKYAEPIPGKPQLADKWDDYASDFGGKLESWYSNRIEKLKKIPESVSDLRNNLEKIRNVLKKQNNASKILELSQKIIEYIRDYGVSFEKPEIIKFSWINKTKDGQKKVFYVAKMADREFIEKLDLWMADLRSQLNEYNQDNKVSFKKKGKKIEELGVLDFALNKAKKNKSTKNENGWQQKLSESIQSAPLFFGEGNRVRNEEVYNLKDLLFSEIKNVENILMSSEAEDLKNIKIEYKEDGAKKGNYVLNVLARFYARFNEDGYGGWNKVKTVLENIAREAGTDFSKYGNNNNRNAGRFYLNGRERQVFTLIKFEKSITVEKILELVKLPSLLDEAYRDLVNENKNHKLRDVIQLSKTIMALVLSHSDKEKQIGGNYIHSKLSGYNALISKRDFISRYSVQTTNGTQCKLAIGKGKSKKGNEIDRYFYAFQFFKNDDSKINLKVIKNNSHKNIDFNDNENKINALQVYSSNYQIQFLDWFFEKHQGKKTSLEVGGSFTIAEKSLTIDWSGSNPRVGFKRSDTEEKRVFVSQPFTLIPDDEDKERRKERMIKTKNRFIGIDIGEYGLAWSLIEVDNGDKNNRGIRQLESGFITDNQQQVLKKNVKSWRQNQIRQTFTSPDTKIARLRESLIGSYKNQLESLMVAKKANLSFEYEVSGFEVGGKRVAKIYDSIKRGSVRKKDNNSQNDQSWGKKGINEWSFETTAAGTSQFCTHCKRWSSLAIVDIEEYELKDYNDNLFKVKINDGEVRLLGKKGWRSGEKIKGKELFGPVKDAMRPNVDGLGMKIVKRKYLKLDLRDWVSRYGNMAIFICPYVDCHHISHADKQAAFNIAV

SEQ ID NO: 124 - protein, 1285 aa, synthetic construct
  REGION 1..1285: note = Description of Artificial Sequence: Synthetic polypeptide
MKLTRRRISGNSVDQKITAAFYRDMSQGLLYYDSEDNDCTDKVIESMDFERSWRGRILKNGEDDKNPFYMFVKGLVGSNDKIVCEPIDVDSDPDNLDILINKNLTGFGRNLKAPDSNDTLENLIRKIQAGIPEEEVLPELKKIKEMIQKDIVNRKEQLLKSIKNNRIPFSLEGSKLVPSTKKMKWLFKLIDVPNKTFNEKMLEKYWEIYDYDKLKANITNRLDKTDKKARSISRAVSEELREYHKNLRTNYNRFVSGDRPAAGLDNGGSAKYNPDKEEFLLFLKEVEQYFKKYFPVKSKHSNKSKDKSLVDKYKNYCSYKVVKKEVNRSIINQLVAGLIQQGKLLYYFYYNDTWQEDFLNSYGLSYIQVEEAFKKSVMTSLSWGINRLTSFFIDDSNTVKFDDITTKKAKEAIESNYFNKLRTCSRMQDHFKEKLAFFYPVYVKDKKDRPDDDIENLIVLVKNAIESVSYLRNRTFHFKESSLLELLKELDDKNSGQNKIDYSVAAEFIKRDIENLYDVFREQIRSLGIAEYYKADMISDCFKTCGLEFALYSPKNSLMPAFKNVYKRGANLNKAYIRDKGPKETGDQGQNSYKALEEYRELTWYIEVKNNDQSYNAYKNLLQLIYYHAFLPEVRENEALITDFINRTKEWNRKETEERLNTKNNKKHKNFDENDDITVNTYRYESIPDYQGESLDDYLKVLQRKQMARAKEVNEKEEGNNNYIQFIRDVVVWAFGAYLENKLKNYKNELQPPLSKENIGLNDTLKELFPEEKVKSPFNIKCRFSISTFIDNKGKSTDNTSAEAVKTDGKEDEKDKKNIKRKDLLCFYLFLRLLDENEICKLQHQFIKYRCSLKERRFPGNRTKLEKETELLAELEELMELVRFTMPSIPEISAKAESGYDTMIKKYFKDFIEKKVFKNPKTSNLYYHSDSKTPVTRKYMALLMRSAPLHLYKDIFKGYYLITKKECLEYIKLSNIIKDYQNSLNELHEQLERIKLKSEKQNGKDSLYLDKKDFYKVKEYVENLEQVARYKHLQHKINFESLYRIFRIHVDIAARMVGYTQDWERDMHFLFKALVYNGVLEERRFEAIFNNNDDNNDGRIVKKIQNNLNNKNRELVSMLCWNKKLNKNEFGAIIWKRNPIAHLNHFTQTEQNSKSSLESLINSLRILLAYDRKRQNAVTKTINDLLLNDYHIRIKWEGRVDEGQIYFNIKEKEDIENEPIIHLKHLHKKDCYIYKNSYMFDKQKEWICNGIKEEVYDKSILKCIGNLFKFDYEDKNKSSANPKHT

SEQ ID NO: 125 - protein, 1344 aa, synthetic construct
  REGION 1..1344: note = Description of Artificial Sequence: Synthetic polypeptide
MLRRDKEVKKLYNVFNQIQVGTKPKKWNNDEKLSPEENERRAQQKNIKMKNYKWREACSKYVESSQRIINDVIFYSYRKAKNKLRYMRKNEDILKKMQEAEKLSKFSGGKLEDFVAYTLRKSLVVSKYDTQEFDSLAAMVVFLECIGKNNISDHEREIVCKLLELIRKDFSKLDPNVKGSQGANIVRSVRNQNMIVQPQGDRFLFPQVYAKENETVTNKNVEKEGLNEFLLNYANLDDEKRAESLRKLRRILDVYFSAPNHYEKDMDITLSDNIEKEKFNVWEKHECGKKETGLFVDIPDVLMEAEAENIKLDAVVEKRERKVLNDRVRKQNIICYRYTRAVVEKYNSNEPLFFENNAINQYWIHHIENAVERILKNCKAGKLFKLRKGYLAEKVWKDAINLISIKYIALGKAVYNFALDDIWKDKKNKELGIVDERIRNGITSFDYEMIKAHENLQRELAVDIAFSVNNLARAVCDMSNLGNKESDFLLWKRNDIADKLKNKDDMASVSAVLQFFGGKSSWDINIFKDAYKGKKKYNYEVRFIDDLRKAIYCARNENFHFKTALVNDEKWNTELFGKIFERETEFCLNVEKDRFYSNNLYMFYQVSELRNMLDHLYSRSVSRAAQVPSYNSVIVRTAFPEYITNVLGYQKPSYDADTLGKWYSACYYLLKEIYYNSFLQSDRALQLFEKSVKTLSWDDKKQQRAVDNFKDHFSDIKSACTSLAQVCQIYMTEYNQQNNQIKKVRSSNDSIFDQPVYQHYKVLLKKAIANAFADYLKNNKDLFGFIGKPFKANEIREIDKEQFLPDWTSRKYEALCIEVSGSQELQKWYIVGKFLNARSLNLMVGSMRSYIQYVTDIKRRAASIGNELHVSVHDVEKVEKWVQVIEVCSLLASRTSNQFEDYFNDKDDYARYLKSYVDFSNVDMPSEYSALVDFSNEEQSDLYVDPKNPKVNRNIVHSKLFAADHILRDIVEPVSKDNIEEFYSQKAEIAYCKIKGKEITAEEQKAVLKYQKLKNRVELRDIVEYGEIINELLGQLINWSFMRERDLLYFQLGFHYDCLRNDSKKPEGYKNIKVDENSIKDAILYQIIGMYVNGVTVYAPEKDGDKLKEQCVKGGVGVKVSAFHRYSKYLGLNEKTLYNAGLEIFEVVAEHEDIINLRNGIDHFKYYLGDYRSMLSIYSEVFDRFFTYDIKYQKNVLNLLQNILLRHNVIVEPILESGFKTIGEQTKPGAKLSIRSIKSDTFQYKVKGGTLITDAKDERYLETIRKILYYAENEEDNLKKSVVVTNADKYEKNKESDDQNKQKEKKNKDNKGKKNEETKSDAEKNNNERLSYNPFANLNFKLSN

SEQ ID NO: 126 - DNA, 20 bp, synthetic construct
  misc_feature 1..20: note = Description of Artificial Sequence: Synthetic oligonucleotide
  source 1..20: mol_type = other DNA
tttttttttttttttttttt

SEQ ID NO: 127 - DNA, 12 bp, synthetic construct
  misc_feature 1..12: note = Description of Artificial Sequence: Synthetic oligonucleotide
  source 1..12: mol_type = other DNA
tttttttttttt

SEQ ID NO: 128 - protein, 18 aa, synthetic construct
  REGION 1..18: note = Description of Artificial Sequence: Synthetic peptide
KRPAATKKAGQAKKKKEF

SEQ ID NO: 129 - protein, 6 aa, synthetic construct
  REGION 1..6: note = Description of Artificial Sequence: Synthetic 6xHis tag
HHHHHH

SEQ ID NO: 130 - RNA, 51 nt, synthetic construct
  misc_feature 1..51: note = Description of Artificial Sequence: Synthetic oligonucleotide
  source 1..51: mol_type = other RNA
ggccaccccaaaaatgaaggggactaaaacacaaacatgatctgggtcatc

SEQ ID NO: 131 - RNA, 50 nt, synthetic construct
  misc_feature 1..50: note = Description of Artificial Sequence: Synthetic oligonucleotide
  source 1..50: mol_type = other RNA
gccaccccaaaaatgaaggggactaaaacacggagtttgctgcgattgct

SEQ ID NO: 132 - RNA, 50 nt, synthetic construct
  misc_feature 1..50: note = Description of Artificial Sequence: Synthetic oligonucleotide
  source 1..50: mol_type = other RNA
gccaaccgcgagaagatgacccagatcatgtttgagaccttcaacacccc

SEQ ID NO: 133 - RNA, 50 nt, synthetic construct
  misc_feature 1..50: note = Description of Artificial Sequence: Synthetic oligonucleotide
  source 1..50: mol_type = other RNA
gccaccccaaaaatgaaggggactaaaacagcgacactaaaacatgatgt

SEQ ID NO: 134 - RNA, 50 nt, synthetic construct
  misc_feature 1..50: note = Description of Artificial Sequence: Synthetic oligonucleotide
  source 1..50: mol_type = other RNA
gccaccccaaaaatgaaggggactaaaacaggacaaagggtaacatagtt

SEQ ID NO: 135 - RNA, 50 nt, synthetic construct
  misc_feature 1..50: note = Description of Artificial Sequence: Synthetic oligonucleotide
  source 1..50: mol_type = other RNA
gccaccccaaaaatgaaggggactaaaacagcatttacaatagaaccccg

SEQ ID NO: 136 - RNA, 50 nt, synthetic construct
  misc_feature 1..50: note = Description of Artificial Sequence: Synthetic oligonucleotide
  source 1..50: mol_type = other RNA
gccaccccaaaaatgaaggggactaaaacagctccatgcaaatatgaagt

SEQ ID NO: 137 - RNA, 50 nt, synthetic construct
  misc_feature 1..50: note = Description of Artificial Sequence: Synthetic oligonucleotide
  source 1..50: mol_type = other RNA
gccaccccaaaaatgaaggggactaaaacaactctgtatgctgcatcaca

SEQ ID NO: 138 - RNA, 50 nt, synthetic construct
  misc_feature 1..50: note = Description of Artificial Sequence: Synthetic oligonucleotide
  source 1..50: mol_type = other RNA
gccaccccaaaaatgaaggggactaaaacataacatggaaagatgtgatg

SEQ ID NO: 139 - RNA, 50 nt, synthetic construct
  misc_feature 1..50: note = Description of Artificial Sequence: Synthetic oligonucleotide
  source 1..50: mol_type = other RNA
gccaccccaaaaatgaaggggactaaaacaatctggctactgattgcaac

SEQ ID NO: 140 - RNA, 50 nt, synthetic construct
  misc_feature 1..50: note = Description of Artificial Sequence: Synthetic oligonucleotide
  source 1..50: mol_type = other RNA
gccaccccaaaaatgaaggggactaaaacacatgacagtatcctccgtga

SEQ ID NO: 141 - RNA, 50 nt, synthetic construct
  misc_feature 1..50: note = Description of Artificial Sequence: Synthetic oligonucleotide
  source 1..50: mol_type = other RNA
gccaccccaaaaatgaaggggactaaaacacatctggctactgattgcaa

SEQ ID NO: 142 - RNA, 50 nt, synthetic construct
  misc_feature 1..50: note = Description of Artificial Sequence: Synthetic oligonucleotide
  source 1..50: mol_type = other RNA
gccaccccaaaaatgaaggggactaaaacaagcagtcctcacgctatttt

SEQ ID NO: 143 - RNA, 50 nt, synthetic construct
  misc_feature 1..50: note = Description of Artificial Sequence: Synthetic oligonucleotide
  source 1..50: mol_type = other RNA
gccaccccaaaaatgaaggggactaaaacagggataatacaacaatctgc

SEQ ID NO: 144 - RNA, 50 nt, synthetic construct
  misc_feature 1..50: note = Description of Artificial Sequence: Synthetic oligonucleotide
  source 1..50: mol_type = other RNA
gccaccccaaaaatgaaggggactaaaacacaagtcatgatgggtgcaga

SEQ ID NO: 145 - RNA, 50 nt, synthetic construct
  misc_feature 1..50: note = Description of Artificial Sequence: Synthetic oligonucleotide
  source 1..50: mol_type = other RNA
gccaccccaaaaatgaaggggactaaaacaatgaatctaggaacggtacc

SEQ ID NO: 146 - RNA, 50 nt, synthetic construct
  misc_feature 1..50: note = Description of Artificial Sequence: Synthetic oligonucleotide
  source 1..50: mol_type = other RNA
gccaccccaaaaatgaaggggactaaaacaaatagtacttttcgacgtga

SEQ ID NO: 147 - RNA, 50 nt, synthetic construct
  misc_feature 1..50: note = Description of Artificial Sequence: Synthetic oligonucleotide
  source 1..50: mol_type = other RNA
gccaccccaaaaatgaaggggactaaaacaagaatgtggggtcatcccac

SEQ ID NO: 148 - RNA, 50 nt, synthetic construct
  misc_feature 1..50: note = Description of Artificial Sequence: Synthetic oligonucleotide
  source 1..50: mol_type = other RNA
gccaccccaaaaatgaaggggactaaaacaagtagcgctaactagggctc

SEQ ID NO: 149 - RNA, 50 nt, synthetic construct
  misc_feature 1..50: note = Description of Artificial Sequence: Synthetic oligonucleotide
  source 1..50: mol_type = other RNA
gccaccccaaaaatgaaggggactaaaacaaccgcttgttatagcggcaa

SEQ ID NO: 150 - RNA, 50 nt, synthetic construct
  misc_feature 1..50: note = Description of Artificial Sequence: Synthetic oligonucleotide
  source 1..50: mol_type = other RNA
gccaccccaaaaatgaaggggactaaaacatggctgaacagtgtaaccgt

SEQ ID NO: 151 - RNA, 50 nt, synthetic construct
  misc_feature 1..50: note = Description of Artificial Sequence: Synthetic oligonucleotide
  source 1..50: mol_type = other RNA
gccaccccaaaaatgaaggggactaaaacaattggtgatccatcagttgc

SEQ ID NO: 152 - RNA, 50 nt, synthetic construct
  misc_feature 1..50: note = Description of Artificial Sequence: Synthetic oligonucleotide
  source 1..50: mol_type = other RNA
gccaccccaaaaatgaaggggactaaaacaaattcatactcagcaccgac

SEQ ID NO: 153 - RNA, 50 nt, synthetic construct
  misc_feature 1..50: note = Description of Artificial Sequence: Synthetic oligonucleotide
  source 1..50: mol_type = other RNA
gccaccccaaaaatgaaggggactaaaacaaacttaggagcaaagcgtgc

SEQ ID NO: 154 - RNA, 50 nt, synthetic construct
  misc_feature 1..50: note = Description of Artificial Sequence: Synthetic oligonucleotide
  source 1..50: mol_type = other RNA
gccaccccaaaaatgaaggggactaaaacattgcgtacagtagtggaact

SEQ ID NO: 155 - RNA, 50 nt, synthetic construct
  misc_feature 1..50: note = Description of Artificial Sequence: Synthetic oligonucleotide
  source 1..50: mol_type = other RNA
gccaccccaaaaatgaaggggactaaaacaatccattggacctctcaaga

SEQ ID NO: 156 - RNA, 50 nt, synthetic construct
  misc_feature 1..50: note = Description of Artificial Sequence: Synthetic oligonucleotide
  source 1..50: mol_type = other RNA
gccaccccaaaaatgaaggggactaaaacaatatgtcacgaaggaatcct

SEQ ID NO: 157 - RNA, 50 nt, synthetic construct
  misc_feature 1..50: note = Description of Artificial Sequence: Synthetic oligonucleotide
  source 1..50: mol_type = other RNA
gccaccccaaaaatgaaggggactaaaacaatattaggaatgctccatac

SEQ ID NO: 158 - RNA, 50 nt, synthetic construct
  misc_feature 1..50: note = Description of Artificial Sequence: Synthetic oligonucleotide
  source 1..50: mol_type = other RNA
gccaccccaaaaatgaaggggactaaaacatagactgggtatatgcatcc

SEQ ID NO: 159 - RNA, 50 nt, synthetic construct
  misc_feature 1..50: note = Description of Artificial Sequence: Synthetic oligonucleotide
  source 1..50: mol_type = other RNA
gccaccccaaaaatgaaggggactaaaacaaaagtacagtccaatcgagt

SEQ ID NO: 160 - RNA, 50 nt, synthetic construct
  misc_feature 1..50: note = Description of Artificial Sequence: Synthetic oligonucleotide
  source 1..50: mol_type = other RNA
gccaccccaaaaatgaaggggactaaaacatactcgtacgtagaaaaccc

SEQ ID NO: 161 - RNA, 50 nt, synthetic construct
  misc_feature 1..50: note = Description of Artificial Sequence: Synthetic oligonucleotide
  source 1..50: mol_type = other RNA
gccaccccaaaaatgaaggggactaaaacatacggtttaacggtggtttg

SEQ ID NO: 162 - RNA, 50 nt, synthetic construct
  misc_feature 1..50: note = Description of Artificial Sequence: Synthetic oligonucleotide
  source 1..50: mol_type = other RNA
gccaccccaaaaatgaaggggactaaaacagccatagcacgtttatcata

SEQ ID NO: 163 - RNA, 50 nt, synthetic construct
  misc_feature 1..50: note = Description of Artificial Sequence: Synthetic oligonucleotide
  source 1..50: mol_type = other RNA
gccaccccaaaaatgaaggggactaaaacacgttgcggacctttaatcat

SEQ ID NO: 164 - RNA, 50 nt, synthetic construct
  misc_feature 1..50: note = Description of Artificial Sequence: Synthetic oligonucleotide
  source 1..50: mol_type = other RNA
gccaccccaaaaatgaaggggactaaaacataccggactttacggctgtt

SEQ ID NO: 165 - RNA, 50 nt, synthetic construct
  misc_feature 1..50: note = Description of Artificial Sequence: Synthetic oligonucleotide
  source 1..50: mol_type = other RNA
gccaccccaaaaatgaaggggactaaaacacgtcgtcatctatacgctga

SEQ ID NO: 166 - RNA, 50 nt, synthetic construct
  misc_feature 1..50: note = Description of Artificial Sequence: Synthetic oligonucleotide
  source 1..50: mol_type = other RNA
gccaccccaaaaatgaaggggactaaaacacgtctaaaacgtttggcaca

SEQ ID NO: 167 - RNA, 50 nt, synthetic construct
  misc_feature 1..50: note = Description of Artificial Sequence: Synthetic oligonucleotide
  source 1..50: mol_type = other RNA
gccaccccaaaaatgaaggggactaaaacaagaaccccttgctcgtttaa

SEQ ID NO: 168 - RNA, 50 nt, synthetic construct
  misc_feature 1..50: note = Description of Artificial Sequence: Synthetic oligonucleotide
  source 1..50: mol_type = other RNA
gccaccccaaaaatgaaggggactaaaacagaacacgcttccaacgaggt

SEQ ID NO: 169 - RNA, 50 nt, synthetic construct
  misc_feature 1..50: note = Description of Artificial Sequence: Synthetic oligonucleotide
  source 1..50: mol_type = other RNA
gccaccccaaaaatgaaggggactaaaacaccccgtacccgtttaaataa

SEQ ID NO: 170 - RNA, 50 nt, synthetic construct
  misc_feature 1..50: note = Description of Artificial Sequence: Synthetic oligonucleotide
  source 1..50: mol_type = other RNA
gccaccccaaaaatgaaggggactaaaacacccgtacccgtttaaataat

SEQ ID NO: 171 - RNA, 50 nt, synthetic construct
  misc_feature 1..50: note = Description of Artificial Sequence: Synthetic oligonucleotide
  source 1..50: mol_type = other RNA
gccaccccaaaaatgaaggggactaaaacagtacccgtttaaataattct

SEQ ID NO: 172 - RNA, 50 nt, synthetic construct
  misc_feature 1..50: note = Description of Artificial Sequence: Synthetic oligonucleotide
  source 1..50: mol_type = other RNA
gccaccccaaaaatgaaggggactaaaacaacattacaattccaaaacat

SEQ ID NO: 173 - RNA, 50 nt, synthetic construct
  misc_feature 1..50: note = Description of Artificial Sequence: Synthetic oligonucleotide
  source 1..50: mol_type = other RNA
gccaccccaaaaatgaaggggactaaaacatcaacactacaaatgtagtt

SEQ ID NO: 174 - RNA, 50 nt, synthetic construct
  misc_feature 1..50: note = Description of Artificial Sequence: Synthetic oligonucleotide
  source 1..50: mol_type = other RNA
gccaccccaaaaatgaaggggactaaaacagcttcaccatcttgcatata

SEQ ID NO: 175 - RNA, 50 nt, synthetic construct
  misc_feature 1..50: note = Description of Artificial Sequence: Synthetic oligonucleotide
  source 1..50: mol_type = other RNA
gccaccccaaaaatgaaggggactaaaacatctagtcgagctgcactaga

SEQ ID NO: 176 - RNA, 50 nt, synthetic construct
  misc_feature 1..50: note = Description of Artificial Sequence: Synthetic oligonucleotide
  source 1..50: mol_type = other RNA
gccaccccaaaaatgaaggggactaaaacatctagtcgagctccactaga

SEQ ID NO: 177 - RNA, 50 nt, synthetic construct
  misc_feature 1..50: note = Description of Artificial Sequence: Synthetic oligonucleotide
  source 1..50: mol_type = other RNA
gccaccccaaaaatgaaggggactaaaacatctagtcgagcggcactaga

SEQ ID NO: 178 - RNA, 50 nt, synthetic construct
  misc_feature 1..50: note = Description of Artificial Sequence: Synthetic oligonucleotide
  source 1..50: mol_type = other RNA
gccaccccaaaaatgaaggggactaaaacaacacggacacccaaagtagt

SEQ ID NO: 179 - RNA, 50 nt, synthetic construct
  misc_feature 1..50: note = Description of Artificial Sequence: Synthetic oligonucleotide
  source 1..50: mol_type = other RNA
gccaccccaaaaatgaaggggactaaaacaacacggttacccaaagtagt

SEQ ID NO: 180 - RNA, 50 nt, synthetic construct
  misc_feature 1..50: note = Description of Artificial Sequence: Synthetic oligonucleotide
  source 1..50: mol_type = other RNA
gccaccccaaaaatgaaggggactaaaacacggcccctgaatgcggctaa

SEQ ID NO: 181 - RNA, 50 nt, synthetic construct
  misc_feature 1..50: note = Description of Artificial Sequence: Synthetic oligonucleotide
  source 1..50: mol_type = other RNA
gccaccccaaaaatgaaggggactaaaacacggcccctgaatgtggctaa

SEQ ID NO: 182 - RNA, 50 nt, synthetic construct
  misc_feature 1..50: note = Description of Artificial Sequence: Synthetic oligonucleotide
  source 1..50: mol_type = other RNA
gccaccccaaaaatgaaggggactaaaacacggtccctgaatgtggctaa

SEQ ID NO: 183 - RNA, 50 nt, synthetic construct
  misc_feature 1..50: note = Description of Artificial Sequence: Synthetic oligonucleotide
  source 1..50: mol_type = other RNA
gccaccccaaaaatgaaggggactaaaacattcttagcactaatagcata

SEQ ID NO: 184 - RNA, 50 nt, synthetic construct
  misc_feature 1..50: note = Description of Artificial Sequence: Synthetic oligonucleotide
  source 1..50: mol_type = other RNA
gccaccccaaaaatgaaggggactaaaacatttttagcactaatggcata

SEQ ID NO: 185 - RNA, 50 nt, synthetic construct
  misc_feature 1..50: note = Description of Artificial Sequence: Synthetic oligonucleotide
  source 1..50: mol_type = other RNA
gccaccccaaaaatgaaggggactaaaacattctttgcactaatggcata

SEQ ID NO: 186 - RNA, 50 nt, synthetic construct
  misc_feature 1..50: note = Description of Artificial Sequence: Synthetic oligonucleotide
  source 1..50: mol_type = other RNA
gccaccccaaaaatgaaggggactaaaacattcttagcactgatagcata

SEQ ID NO: 187 - RNA, 50 nt, synthetic construct
  misc_feature 1..50: note = Description of Artificial Sequence: Synthetic oligonucleotide
  source 1..50: mol_type = other RNA
gccaccccaaaaatgaaggggactaaaacaagtgagcgaggactgcagcg

SEQ ID NO: 188 - RNA, 50 nt, synthetic construct
  misc_feature 1..50: note = Description of Artificial Sequence: Synthetic oligonucleotide
  source 1..50: mol_type = other RNA
gccaccccaaaaatgaaggggactaaaacacttctaaccgaggtcgaaac

SEQ ID NO: 189 - RNA, 50 nt, synthetic construct
  misc_feature 1..50: note = Description of Artificial Sequence: Synthetic oligonucleotide
  source 1..50: mol_type = other RNA
gccaccccaaaaatgaaggggactaaaacaacagccagacagcgaccaaa

SEQ ID NO: 190 - RNA, 50 nt, synthetic construct
  misc_feature 1..50: note = Description of Artificial Sequence: Synthetic oligonucleotide
  source 1..50: mol_type = other RNA
gccaccccaaaaatgaaggggactaaaacagaaaatgtttcaaatatcag

SEQ ID NO: 191 - RNA, 50 nt, synthetic construct
  misc_feature 1..50: note = Description of Artificial Sequence: Synthetic oligonucleotide
  source 1..50: mol_type = other RNA
gccaccccaaaaatgaaggggactaaaacaacattgtatgaaatgaagga

SEQ ID NO: 192 - RNA, 50 nt, synthetic construct
  misc_feature 1..50: note = Description of Artificial Sequence: Synthetic oligonucleotide
  source 1..50: mol_type = other RNA
gccaccccaaaaatgaaggggactaaaacatgggagggacacagcagagg

SEQ ID NO: 193 - RNA, 50 nt, synthetic construct
  misc_feature 1..50: note = Description of Artificial Sequence: Synthetic oligonucleotide
  source 1..50: mol_type = other RNA
gccaccccaaaaatgaaggggactaaaacagtctgtgccagcatgaactc

SEQ ID NO: 194 - RNA, 50 nt, synthetic construct
  misc_feature 1..50: note = Description of Artificial Sequence: Synthetic oligonucleotide
  source 1..50: mol_type = other RNA
gccaccccaaaaatgaaggggactaaaacagactttagatcggcgccgta

SEQ ID NO: 195 - RNA, 50 nt, synthetic construct
  misc_feature 1..50: note = Description of Artificial Sequence: Synthetic oligonucleotide
  source 1..50: mol_type = other RNA
gccaccccaaaaatgaaggggactaaaacatagacaacaggtgcgctcag

SEQ ID NO: 196 - RNA, 50 nt, synthetic construct
  misc_feature 1..50: note = Description of Artificial Sequence: Synthetic oligonucleotide
  source 1..50: mol_type = other RNA
gccaccccaaaaatgaaggggactaaaacatatcaacgggcgtctcgagt

SEQ ID NO: 197 - RNA, 50 nt, synthetic construct
  misc_feature 1..50: note = Description of Artificial Sequence: Synthetic oligonucleotide
  source 1..50: mol_type = other RNA
gccaccccaaaaatgaaggggactaaaacatgcatcaagtgtgcgcgcaa

SEQ ID NO: 198 - RNA, 50 nt, synthetic construct
  misc_feature 1..50: note = Description of Artificial Sequence: Synthetic oligonucleotide
  source 1..50: mol_type = other RNA
gccaccccaaaaatgaaggggactaaaacagagtgatcgcaactttgcgc

SEQ ID NO: 199 - RNA, 50 nt, synthetic construct
  misc_feature 1..50: note = Description of Artificial Sequence: Synthetic oligonucleotide
  source 1..50: mol_type = other RNA
gccaccccaaaaatgaaggggactaaaacaagtacgcacacaatcgaagc

SEQ ID NO: 200 - RNA, 50 nt, synthetic construct
  misc_feature 1..50: note = Description of Artificial Sequence: Synthetic oligonucleotide
  source 1..50: mol_type = other RNA
gccaccccaaaaatgaaggggactaaaacaacaatcgaagcgcagtaagg

SEQ ID NO: 201 - RNA, 50 nt, synthetic construct
  misc_feature 1..50: note = Description of Artificial Sequence: Synthetic oligonucleotide
  source 1..50: mol_type = other RNA
gccaccccaaaaatgaaggggactaaaacagcagtacgcacacaatcgaa

SEQ ID NO: 202 - RNA, 50 nt, synthetic construct
  misc_feature 1..50: note = Description of Artificial Sequence: Synthetic oligonucleotide
  source 1..50: mol_type = other RNA
gccaccccaaaaatgaaggggactaaaacattcggtcacacccggacgaa

SEQ ID NO: 203 - RNA, 50 nt, synthetic construct
  misc_feature 1..50: note = Description of Artificial Sequence: Synthetic oligonucleotide
  source 1..50: mol_type = other RNA
gccaccccaaaaatgaaggggactaaaacacaacggtaatagtaccgttg

SEQ ID NO: 204 - RNA, 50 nt, synthetic construct
  misc_feature 1..50: note = Description of Artificial Sequence: Synthetic oligonucleotide
  source 1..50: mol_type = other RNA
gccaccccaaaaatgaaggggactaaaacatacctttcggtcacacccgg

SEQ ID NO: 205 - RNA, 50 nt, synthetic construct
  misc_feature 1..50: note = Description of Artificial Sequence: Synthetic oligonucleotide
  source 1..50: mol_type = other RNA
gccaccccaaaaatgaaggggactaaaacaggagaccttgcattgcctta

SEQ ID NO: 206 - RNA, 50 nt, synthetic construct
  misc_feature 1..50: note = Description of Artificial Sequence: Synthetic oligonucleotide
  source 1..50: mol_type = other RNA
gccaccccaaaaatgaaggggactaaaacaagatcaatagtcgcttcaaa

SEQ ID NO: 207 - RNA, 50 nt, synthetic construct
  misc_feature 1..50: note = Description of Artificial Sequence: Synthetic oligonucleotide
  source 1..50: mol_type = other RNA
gccaccccaaaaatgaaggggactaaaacattgtaactttcgaattcagt

SEQ ID NO: 208 - RNA, 50 nt, synthetic construct
  misc_feature 1..50: note = Description of Artificial Sequence: Synthetic oligonucleotide
  source 1..50: mol_type = other RNA
gccaccccaaaaatgaaggggactaaaacacctacttcgttccccccaga

SEQ ID NO: 209 - RNA, 50 nt, synthetic construct
  misc_feature 1..50: note = Description of Artificial Sequence: Synthetic oligonucleotide
  source 1..50: mol_type = other RNA
gccaccccaaaaatgaaggggactaaaacaaaacccgccaacactgcatt

SEQ ID NO: 210 - RNA, 50 nt, synthetic construct
  misc_feature 1..50: note = Description of Artificial Sequence: Synthetic oligonucleotide
  source 1..50: mol_type = other RNA
gccaccccaaaaatgaaggggactaaaacattttcacacttcattgttga

SEQ ID NO: 211 - RNA, 50 nt, synthetic construct
  misc_feature 1..50: note = Description of Artificial Sequence: Synthetic oligonucleotide
  source 1..50: mol_type = other RNA
gccaccccaaaaatgaaggggactaaaacaggatcttcactaaattctgc

SEQ ID NO: 212 - RNA, 50 nt, synthetic construct
  misc_feature 1..50: note = Description of Artificial Sequence: Synthetic oligonucleotide
  source 1..50: mol_type = other RNA
gccaccccaaaaatgaaggggactaaaacagcacacagaatgccattaac

SEQ ID NO: 213 - RNA, 50 nt, synthetic construct
  misc_feature 1..50: note = Description of Artificial Sequence: Synthetic oligonucleotide
  source 1..50: mol_type = other RNA
gccaccccaaaaatgaaggggactaaaacaacatttacaaccgcaaatgc

SEQ ID NO: 214 - RNA, 50 nt, synthetic construct
  misc_feature 1..50: note = Description of Artificial Sequence: Synthetic oligonucleotide
  source 1..50: mol_type = other RNA
gccaccccaaaaatgaaggggactaaaacatacccaggagatttcatcaa

SEQ ID NO: 215 - RNA, 50 nt, synthetic construct
  misc_feature 1..50: note = Description of Artificial Sequence: Synthetic oligonucleotide
  source 1..50: mol_type = other RNA
gccaccccaaaaatgaaggggactaaaacaaatgaaagaactttggacta

SEQ ID NO: 216 - RNA, 50 nt, synthetic construct
  misc_feature 1..50: note = Description of Artificial Sequence: Synthetic oligonucleotide
  source 1..50: mol_type = other RNA
gccaccccaaaaatgaaggggactaaaacaatgaaggcaatactagtagt

SEQ ID NO: 217 - RNA, 50 nt, synthetic construct
  misc_feature 1..50: note = Description of Artificial Sequence: Synthetic oligonucleotide
  source 1..50: mol_type = other RNA
gccaccccaaaaatgaaggggactaaaacatcatcatttgaaaggtttga

SEQ ID NO: 218 - RNA, 50 nt, synthetic construct
  misc_feature 1..50: note = Description of Artificial Sequence: Synthetic oligonucleotide
  source 1..50: mol_type = other RNA
gccaccccaaaaatgaaggggactaaaacaagacaaagaatccactcaaa

SEQ ID NO: 219 - RNA, 50 nt, synthetic construct
  misc_feature 1..50: note = Description of Artificial Sequence: Synthetic oligonucleotide
  source 1..50: mol_type = other RNA
gccaccccaaaaatgaaggggactaaaacagctatcatgattgccagtga

SEQ ID NO: 220 - RNA, 50 nt, synthetic construct
  misc_feature 1..50: note = Description of Artificial Sequence: Synthetic oligonucleotide
  source 1..50: mol_type = other RNA
gccaccccaaaaatgaaggggactaaaacacagacaaagaatccactcaa

SEQ ID NO: 221 - RNA, 50 nt, synthetic construct
  misc_feature 1..50: note = Description of Artificial Sequence: Synthetic oligonucleotide
  source 1..50: mol_type = other RNA
gccaccccaaaaatgaaggggactaaaacacatgatatggcaaaggaaat

SEQ ID NO: 222 - RNA, 50 nt, synthetic construct
  misc_feature 1..50: note = Description of Artificial Sequence: Synthetic oligonucleotide
  source 1..50: mol_type = other RNA
gccaccccaaaaatgaaggggactaaaacatggatttcctttgccatatc

SEQ ID NO: 223 - RNA, 50 nt, synthetic construct
  misc_feature 1..50: note = Description of Artificial Sequence: Synthetic oligonucleotide
  source 1..50: mol_type = other RNA
gccaccccaaaaatgaaggggactaaaacatcccaaccattttctatgaa

SEQ ID NO: 224 - RNA, 50 nt, synthetic construct
  misc_feature 1..50: note = Description of Artificial Sequence: Synthetic oligonucleotide
  source 1..50: mol_type = other RNA
gccaccccaaaaatgaaggggactaaaacatgtagaaccaggagatctca

SEQ ID NO: 225 - RNA, 50 nt, synthetic construct
  misc_feature 1..50: note = Description of Artificial Sequence: Synthetic oligonucleotide
  source 1..50: mol_type = other RNA
gccaccccaaaaatgaaggggactaaaacacaacaactgcatcgaaagca

SEQ ID NO: 226 - RNA, 50 nt, synthetic construct
  misc_feature 1..50: note = Description of Artificial Sequence: Synthetic oligonucleotide
  source 1..50: mol_type = other RNA
gccaccccaaaaatgaaggggactaaaacaggcaaccagaggtctgtttg

SEQ ID NO: 227 - RNA, 50 nt, synthetic construct
  misc_feature 1..50: note = Description of Artificial Sequence: Synthetic oligonucleotide
  source 1..50: mol_type = other RNA
gccaccccaaaaatgaaggggactaaaacaatagttttcaataccatagg

SEQ ID NO: 228 - RNA, 50 nt, synthetic construct
  misc_feature 1..50: note = Description of Artificial Sequence: Synthetic oligonucleotide
  source 1..50: mol_type = other RNA
gccaccccaaaaatgaaggggactaaaacataaatctgatgggaatgcat

SEQ ID NO: 229 - RNA, 50 nt, synthetic construct
  misc_feature 1..50: note = Description of Artificial Sequence: Synthetic oligonucleotide
  source 1..50: mol_type = other RNA
gccaccccaaaaatgaaggggactaaaacatgctctgggaagcccgggtt

SEQ ID NO: 230 - RNA, 50 nt, synthetic construct
  misc_feature 1..50: note = Description of Artificial Sequence: Synthetic oligonucleotide
  source 1..50: mol_type = other RNA
gccaccccaaaaatgaaggggactaaaacagaagacggattcctagatgt

SEQ ID NO: 231 - RNA, 50 nt, synthetic construct
  misc_feature 1..50: note = Description of Artificial Sequence: Synthetic oligonucleotide
  source 1..50: mol_type = other RNA
gccaccccaaaaatgaaggggactaaaacatcagaagaagcaagattaaa

SEQ ID NO: 232 - RNA, 50 nt, synthetic construct
  misc_feature 1..50: note = Description of Artificial Sequence: Synthetic oligonucleotide
  source 1..50: mol_type = other RNA
gccaccccaaaaatgaaggggactaaaacacagtattcagaagaagcaag

SEQ ID NO: 233 - RNA, 50 nt, synthetic construct
  misc_feature 1..50: note = Description of Artificial Sequence: Synthetic oligonucleotide
  source 1..50: mol_type = other RNA
gccaccccaaaaatgaaggggactaaaacagacacacaacgggaagctct

SEQ ID NO: 234 - RNA, 50 nt, synthetic construct
  misc_feature 1..50: note = Description of Artificial Sequence: Synthetic oligonucleotide
  source 1..50: mol_type = other RNA
gccaccccaaaaatgaaggggactaaaacaagacatactggaaaagacac

SEQ ID NO: 235 - RNA, 50 nt, synthetic construct
  misc_feature 1..50: note = Description of Artificial Sequence: Synthetic oligonucleotide
  source 1..50: mol_type = other RNA
gccaccccaaaaatgaaggggactaaaacaggtctttggatgtgttcaaa

SEQ ID NO: 236 - RNA, 50 nt, synthetic construct
  misc_feature 1..50: note = Description of Artificial Sequence: Synthetic oligonucleotide
  source 1..50: mol_type = other RNA
gccaccccaaaaatgaaggggactaaaacatggatgtgttcaaatggttc

SEQ ID NO: 237 - RNA, 50 nt, synthetic construct
  misc_feature 1..50: note = Description of Artificial Sequence: Synthetic oligonucleotide
  source 1..50: mol_type = other RNA
gccaccccaaaaatgaaggggactaaaacactttggatgtgttcaaatgg

SEQ ID NO: 238 - RNA, 50 nt, synthetic construct
  misc_feature 1..50: note = Description of Artificial Sequence: Synthetic oligonucleotide
  source 1..50: mol_type = other RNA
gccaccccaaaaatgaaggggactaaaacagttcttcttgaaaacgaaag

SEQ ID NO: 239 - RNA, 50 nt, synthetic construct
  misc_feature 1..50: note = Description of Artificial Sequence: Synthetic oligonucleotide
  source 1..50: mol_type = other RNA
gccaccccaaaaatgaaggggactaaaacaagtacggtatcgagcagtct

SEQ ID NO: 240 - RNA, 50 nt, synthetic construct
  misc_feature 1..50: note = Description of Artificial Sequence: Synthetic oligonucleotide
  source 1..50: mol_type = other RNA
gccaccccaaaaatgaaggggactaaaacacttggtgatcaaagctggtc

SEQ ID NO: 241 - RNA, 50 nt, synthetic construct
  misc_feature 1..50: note = Description of Artificial Sequence: Synthetic oligonucleotide
  source 1..50: mol_type = other RNA
gccaccccaaaaatgaaggggactaaaacaatatacaaatagtgcaccgc

SEQ ID NO: 242 - RNA, 50 nt, synthetic construct
  misc_feature 1..50: note = Description of Artificial Sequence: Synthetic oligonucleotide
  source 1..50: mol_type = other RNA
gccaccccaaaaatgaaggggactaaaacatatacaaatagtgcaccgca

SEQ ID NO: 243 - RNA, 50 nt, synthetic construct
  misc_feature 1..50: note = Description of Artificial Sequence: Synthetic oligonucleotide
  source 1..50: mol_type = other RNA
gccaccccaaaaatgaaggggactaaaacatgcggtgcactatttgtata

SEQ ID NO: 244 - RNA, 50 nt, synthetic construct
  misc_feature 1..50: note = Description of Artificial Sequence: Synthetic oligonucleotide
  source 1..50: mol_type = other RNA
gccaccccaaaaatgaaggggactaaaacagaacatgcatctacaagatc

SEQ ID NO: 245 - RNA, 50 nt, synthetic construct
  misc_feature 1..50: note = Description of Artificial Sequence: Synthetic oligonucleotide
  source 1..50: mol_type = other RNA
gccaccccaaaaatgaaggggactaaaacaaacatgcatctacaagatcc

SEQ ID NO: 246 - RNA, 50 nt, synthetic construct
  misc_feature 1..50: note = Description of Artificial Sequence: Synthetic oligonucleotide
  source 1..50: mol_type = other RNA
gccaccccaaaaatgaaggggactaaaacaatcttgtagatgcatgttct

SEQ ID NO: 247 - RNA, 50 nt, synthetic construct
  misc_feature 1..50: note = Description of Artificial Sequence: Synthetic oligonucleotide
  source 1..50: mol_type = other RNA
gccaccccaaaaatgaaggggactaaaacaaaggcagcaaaccccattgc

SEQ ID NO: 248 - RNA, 50 nt, synthetic construct
  misc_feature 1..50: note = Description of Artificial Sequence: Synthetic oligonucleotide
  source 1..50: mol_type = other RNA
gccaccccaaaaatgaaggggactaaaacaaggcagcaaaccccattgca

SEQ ID NO: 249 - RNA, 50 nt, synthetic construct
  misc_feature 1..50: note = Description of Artificial Sequence: Synthetic oligonucleotide
  source 1..50: mol_type = other RNA
gccaccccaaaaatgaaggggactaaaacaggcagcaaaccccattgcaa

SEQ ID NO: 250 - RNA, 50 nt, synthetic construct
  misc_feature 1..50: note = Description of Artificial Sequence: Synthetic oligonucleotide
  source 1..50: mol_type = other RNA
gccaccccaaaaatgaaggggactaaaacaggtttagcttcggggcatca

SEQ ID NO: 251 - RNA, 50 nt, synthetic construct
  misc_feature 1..50: note = Description of Artificial Sequence: Synthetic oligonucleotide
  source 1..50: mol_type = other RNA
gccaccccaaaaatgaaggggactaaaacatgtggggaattcatcaccct

SEQ ID NO: 252 - RNA, 50 nt, synthetic construct
  misc_feature 1..50: note = Description of Artificial Sequence: Synthetic oligonucleotide
  source 1..50: mol_type = other RNA
gccaccccaaaaatgaaggggactaaaacatcaccttctcacacaatggg

SEQ ID NO: 253 - RNA, 50 nt, synthetic construct
  misc_feature 1..50: note = Description of Artificial Sequence: Synthetic oligonucleotide
  source 1..50: mol_type = other RNA
gccaccccaaaaatgaaggggactaaaacatggaaacatgcgatgcacaa

SEQ ID NO: 254 - RNA, 50 nt, synthetic construct
  misc_feature 1..50: note = Description of Artificial Sequence: Synthetic oligonucleotide
  source 1..50: mol_type = other RNA
gccaccccaaaaatgaaggggactaaaacactgagctattggtagcaatg

SEQ ID NO: 255 - RNA, 50 nt, synthetic construct
  misc_feature 1..50: note = Description of Artificial Sequence: Synthetic oligonucleotide
  source 1..50: mol_type = other RNA
gccaccccaaaaatgaaggggactaaaacatcttgataaaatctgcctag

SEQ ID NO: 256 - RNA, 50 nt, synthetic construct
  misc_feature 1..50: note = Description of Artificial Sequence: Synthetic oligonucleotide
  source 1..50: mol_type = other RNA
gccaccccaaaaatgaaggggactaaaacaacagctgcattgcaagcagt

SEQ ID NO: 257 - RNA, 50 nt, synthetic construct
  misc_feature 1..50: note = Description of Artificial Sequence: Synthetic oligonucleotide
  source 1..50: mol_type = other RNA
gccaccccaaaaatgaaggggactaaaacatgcaaatggtacatctacat

SEQ ID NO: 258 - RNA, 50 nt, synthetic construct
  misc_feature 1..50: note = Description of Artificial Sequence: Synthetic oligonucleotide
  source 1..50: mol_type = other RNA
gccaccccaaaaatgaaggggactaaaacaacttgcaatgcagctgtaaa

SEQ ID NO: 259 - RNA, 50 nt, synthetic construct
  misc_feature 1..50: note = Description of Artificial Sequence: Synthetic oligonucleotide
  source 1..50: mol_type = other RNA
gccaccccaaaaatgaaggggactaaaacaatgaaacccccaataatcat

SEQ ID NO: 260 - RNA, 50 nt, synthetic construct
  misc_feature 1..50: note = Description of Artificial Sequence: Synthetic oligonucleotide
  source 1..50: mol_type = other RNA
gccaccccaaaaatgaaggggactaaaacaaatgaaacccccaataatca

SEQ ID NO: 261 - RNA, 50 nt, synthetic construct
  misc_feature 1..50: note = Description of Artificial Sequence: Synthetic oligonucleotide
  source 1..50: mol_type = other RNA
gccaccccaaaaatgaaggggactaaaacataagcttgaggcaacactgc

SEQ ID NO: 262 - RNA, 50 nt, synthetic construct
  misc_feature 1..50: note = Description of Artificial Sequence: Synthetic oligonucleotide
  source 1..50: mol_type = other RNA
gccaccccaaaaatgaaggggactaaaacaacaacactgcttgcaatgca

SEQ ID NO: 263 - RNA, 50 nt, synthetic construct
  misc_feature 1..50: note = Description of Artificial Sequence: Synthetic oligonucleotide
  source 1..50: mol_type = other RNA
gccaccccaaaaatgaaggggactaaaacacaacactgcttgcaatgcag

SEQ ID NO: 264 - RNA, 50 nt, synthetic construct
  misc_feature 1..50: note = Description of Artificial Sequence: Synthetic oligonucleotide
  source 1..50: mol_type = other RNA
gccaccccaaaaatgaaggggactaaaacatacaacactgcttgcaatgc

SEQ ID NO: 265 - RNA, 50 nt, synthetic construct
  misc_feature 1..50: note = Description of Artificial Sequence: Synthetic oligonucleotide
  source 1..50: mol_type = other RNA
gccaccccaaaaatgaaggggactaaaacaacaaagcatgacatggagaa

SEQ ID NO: 266 - RNA, 50 nt, synthetic construct
  misc_feature 1..50: note = Description of Artificial Sequence: Synthetic oligonucleotide
  source 1..50: mol_type = other RNA
gccaccccaaaaatgaaggggactaaaacatagagaagacaaatgaaaaa

SEQ ID NO: 267 - RNA, 50 nt, synthetic construct
  misc_feature 1..50: note = Description of Artificial Sequence: Synthetic oligonucleotide
  source 1..50: mol_type = other RNA
gccaccccaaaaatgaaggggactaaaacaacccattcgatgttccagat

SEQ ID NO: 268 - RNA, 50 nt, synthetic construct
  misc_feature 1..50: note = Description of Artificial Sequence: Synthetic oligonucleotide
  source 1..50: mol_type = other RNA
gccaccccaaaaatgaaggggactaaaacaaaggggcattagagcggaga

SEQ ID NO: 269 - RNA, 50 nt, synthetic construct
  misc_feature 1..50: note = Description of Artificial Sequence: Synthetic oligonucleotide
  source 1..50: mol_type = other RNA
gccaccccaaaaatgaaggggactaaaacaaccaggtgttcccacaacta

SEQ ID NO: 270 - RNA, 50 nt, synthetic construct
  misc_feature 1..50: note = Description of Artificial Sequence: Synthetic oligonucleotide
  source 1..50: mol_type = other RNA
gccaccccaaaaatgaaggggactaaaacatacaaaataggataatgatc

SEQ ID NO: 271 - RNA, 50 nt, synthetic construct
  misc_feature 1..50: note = Description of Artificial Sequence: Synthetic oligonucleotide
  source 1..50: mol_type = other RNA
gccaccccaaaaatgaaggggactaaaacagagtggagtgaggatggcca

SEQ ID NO: 272 - RNA, 50 nt, synthetic construct
  misc_feature 1..50: note = Description of Artificial Sequence: Synthetic oligonucleotide
  source 1..50: mol_type = other RNA
gccaccccaaaaatgaaggggactaaaacaggtgatttggggaatccacc

SEQ ID NO: 273 - RNA, 50 nt, synthetic construct
  misc_feature 1..50: note = Description of Artificial Sequence: Synthetic oligonucleotide
  source 1..50: mol_type = other RNA
gccaccccaaaaatgaaggggactaaaacatggagtaaactcttttagca

SEQ ID NO: 274 - RNA, 50 nt, synthetic construct
  misc_feature 1..50: note = Description of Artificial Sequence: Synthetic oligonucleotide
  source 1..50: mol_type = other RNA
gccaccccaaaaatgaaggggactaaaacacaaacgctatgagctcgaga

SEQ ID NO: 275 - RNA, 50 nt, synthetic construct
  misc_feature 1..50: note = Description of Artificial Sequence: Synthetic oligonucleotide
  source 1..50: mol_type = other RNA
gccaccccaaaaatgaaggggactaaaacagcacgatgcaaatgtcagaa

SEQ ID NO: 276 - RNA, 50 nt, synthetic construct
  misc_feature 1..50: note = Description of Artificial Sequence: Synthetic oligonucleotide
  source 1..50: mol_type = other RNA
gccaccccaaaaatgaaggggactaaaacagatgaacggaaattatgatt

SEQ ID NO: 277 - RNA, 50 nt, synthetic construct
  misc_feature 1..50: note = Description of Artificial Sequence: Synthetic oligonucleotide
  source 1..50: mol_type = other RNA
gccaccccaaaaatgaaggggactaaaacatggtcttggccagacggtgc

SEQ ID NO: 278 - RNA, 50 nt, synthetic construct
  misc_feature 1..50: note = Description of Artificial Sequence: Synthetic oligonucleotide
  source 1..50: mol_type = other RNA
gccaccccaaaaatgaaggggactaaaacatccaagggggatgtgtttgt

SEQ ID NO: 279 - RNA, 50 nt, synthetic construct
  misc_feature 1..50: note = Description of Artificial Sequence: Synthetic oligonucleotide
  source 1..50: mol_type = other RNA
gccaccccaaaaatgaaggggactaaaacaagaacacaagagtctgaatg

SEQ ID NO: 280 - RNA, 50 nt, synthetic construct
  misc_feature 1..50: note = Description of Artificial Sequence: Synthetic oligonucleotide
  source 1..50: mol_type = other RNA
gccaccccaaaaatgaaggggactaaaacagtttggatagggagaactaa

SEQ ID NO: 281 - RNA, 50 nt, synthetic construct
  misc_feature 1..50: note = Description of Artificial Sequence: Synthetic oligonucleotide
  source 1..50: mol_type = other RNA
gccaccccaaaaatgaaggggactaaaacatttgagtcagtcgcttggtc

SEQ ID NO: 282 - RNA, 50 nt, synthetic construct
  misc_feature 1..50: note = Description of Artificial Sequence: Synthetic oligonucleotide
  source 1..50: mol_type = other RNA
gccaccccaaaaatgaaggggactaaaacatctagtgaaatcacatgtgt

SEQ ID NO: 283 - RNA, 50 nt, synthetic construct
  misc_feature 1..50: note = Description of Artificial Sequence: Synthetic oligonucleotide
  source 1..50: mol_type = other RNA
gccaccccaaaaatgaaggggactaaaacattatggaacaggctcatggc

SEQ ID NO: 284 - RNA, 50 nt, synthetic construct
  misc_feature 1..50: note = Description of Artificial Sequence: Synthetic oligonucleotide
  source 1..50: mol_type = other RNA
gccaccccaaaaatgaaggggactaaaacactccatcaggccatgagcct

SEQ ID NO: 285 - RNA, 50 nt, synthetic construct
  misc_feature 1..50: note = Description of Artificial Sequence: Synthetic oligonucleotide
  source 1..50: mol_type = other RNA
gccaccccaaaaatgaaggggactaaaacatgccccatcaggccatgagc

SEQ ID NO: 286 - RNA, 50 nt, synthetic construct
  misc_feature 1..50: note = Description of Artificial Sequence: Synthetic oligonucleotide
  source 1..50: mol_type = other RNA
gccaccccaaaaatgaaggggactaaaacaatcctttgatttggattcat

SEQ ID NO: 287 - RNA, 50 nt, synthetic construct
  misc_feature 1..50: note = Description of Artificial Sequence: Synthetic oligonucleotide
  source 1..50: mol_type = other RNA
gccaccccaaaaatgaaggggactaaaacattatcttctgatttggattc

SEQ ID NO: 288 - RNA, 50 nt, synthetic construct
  misc_feature 1..50: note = Description of Artificial Sequence: Synthetic oligonucleotide
  source 1..50: mol_type = other RNA
gccaccccaaaaatgaaggggactaaaacatatcctttgattcggattca

SEQ ID NO: 289 - RNA, 50 nt, synthetic construct
  misc_feature 1..50: note = Description of Artificial Sequence: Synthetic oligonucleotide
  source 1..50: mol_type = other RNA
gccaccccaaaaatgaaggggactaaaacagaccaacctgtggtatcaga

SEQ ID NO: 290 - RNA, 50 nt, synthetic construct
  misc_feature 1..50: note = Description of Artificial Sequence: Synthetic oligonucleotide
  source 1..50: mol_type = other RNA
gccaccccaaaaatgaaggggactaaaacactctgttgccttttgacata

SEQ ID NO: 291 - RNA, 50 nt, synthetic construct
  misc_feature 1..50: note = Description of Artificial Sequence: Synthetic oligonucleotide
  source 1..50: mol_type = other RNA
gccaccccaaaaatgaaggggactaaaacaccaacctgtggtatcggaat

SEQ ID NO: 292 - RNA, 50 nt, synthetic construct
  misc_feature 1..50: note = Description of Artificial Sequence: Synthetic oligonucleotide
  source 1..50: mol_type = other RNA
gccaccccaaaaatgaaggggactaaaacataataacagacactatcaag

SEQ ID NO: 293 - RNA, 50 nt, synthetic construct
  misc_feature 1..50: note = Description of Artificial Sequence: Synthetic oligonucleotide
  source 1..50: mol_type = other RNA
gccaccccaaaaatgaaggggactaaaacatggaatgcagaactttcttt

SEQ ID NO: 294 - RNA, 50 nt, synthetic construct
  misc_feature 1..50: note = Description of Artificial Sequence: Synthetic oligonucleotide
  source 1..50: mol_type = other RNA
gccaccccaaaaatgaaggggactaaaacagaactcaagagtctgaatgt

SEQ ID NO: 295 - RNA, 50 nt, synthetic construct
  misc_feature 1..50: note = Description of Artificial Sequence: Synthetic oligonucleotide
  source 1..50: mol_type = other RNA
gccaccccaaaaatgaaggggactaaaacagcggctttgaaatgatttgg

SEQ ID NO: 296 - RNA, 50 nt, synthetic construct
  misc_feature 1..50: note = Description of Artificial Sequence: Synthetic oligonucleotide
  source 1..50: mol_type = other RNA
gccaccccaaaaatgaaggggactaaaacagtgtctggatcgggagaacc

SEQ ID NO: 297 - RNA, 50 nt, synthetic construct
  misc_feature 1..50: note = Description of Artificial Sequence: Synthetic oligonucleotide
  source 1..50: mol_type = other RNA
gccaccccaaaaatgaaggggactaaaacatcgaattggatgctcctaat

SEQ ID NO: 298 - RNA, 50 nt, synthetic construct
  misc_feature 1..50: note = Description of Artificial Sequence: Synthetic oligonucleotide
  source 1..50: mol_type = other RNA
gccaccccaaaaatgaaggggactaaaacaatgatgacccacacaagcaa

SEQ ID NO: 299 - RNA, 50 nt, synthetic construct
  misc_feature 1..50: note = Description of Artificial Sequence: Synthetic oligonucleotide
  source 1..50: mol_type = other RNA
gccaccccaaaaatgaaggggactaaaacaaagataacatgcatttcagc

SEQ ID NO: 300 - RNA, 50 nt, synthetic construct
  misc_feature 1..50: note = Description of Artificial Sequence: Synthetic oligonucleotide
  source 1..50: mol_type = other RNA
gccaccccaaaaatgaaggggactaaaacaaatgaccccaccaatgggaa

SEQ ID NO: 301 - RNA, 50 nt, synthetic construct
  misc_feature 1..50: note = Description of Artificial Sequence: Synthetic oligonucleotide
  source 1..50: mol_type = other RNA
gccaccccaaaaatgaaggggactaaaacagaatgcataggatggtcaag

SEQ ID NO: 302 - RNA, 50 nt, synthetic construct
  misc_feature 1..50: note = Description of Artificial Sequence: Synthetic oligonucleotide
  source 1..50: mol_type = other RNA
gccaccccaaaaatgaaggggactaaaacaaacattccaaacatgaatga

SEQ ID NO: 303 - RNA, 50 nt, synthetic construct
  misc_feature 1..50: note = Description of Artificial Sequence: Synthetic oligonucleotide
  source 1..50: mol_type = other RNA
gccaccccaaaaatgaaggggactaaaacaaataacaatgcatcggcagt

SEQ ID NO: 304 - RNA, 50 nt, synthetic construct
  misc_feature 1..50: note = Description of Artificial Sequence: Synthetic oligonucleotide
  source 1..50: mol_type = other RNA
gccaccccaaaaatgaaggggactaaaacagtgattgagaatgaatccta

SEQ ID NO: 305 - RNA, 50 nt, synthetic construct
  misc_feature 1..50: note = Description of Artificial Sequence: Synthetic oligonucleotide
  source 1..50: mol_type = other RNA
gccaccccaaaaatgaaggggactaaaacatgaaagtgaacaaataatag

SEQ ID NO: 306 - RNA, 50 nt, synthetic construct
  misc_feature 1..50: note = Description of Artificial Sequence: Synthetic oligonucleotide
  source 1..50: mol_type = other RNA
gccaccccaaaaatgaaggggactaaaacattccttccccgatggggcac

SEQ ID NO: 307 - RNA, 50 nt, synthetic construct
  misc_feature 1..50: note = Description of Artificial Sequence: Synthetic oligonucleotide
  source 1..50: mol_type = other RNA
gccaccccaaaaatgaaggggactaaaacattggtggacgagcaacagtt

SEQ ID NO: 308 - RNA, 50 nt, synthetic construct
  misc_feature 1..50: note = Description of Artificial Sequence: Synthetic oligonucleotide
  source 1..50: mol_type = other RNA
gccaccccaaaaatgaaggggactaaaacaaggaagtttcattgactatt

SEQ ID NO: 309 - RNA, 50 nt, synthetic construct
  misc_feature 1..50: note = Description of Artificial Sequence: Synthetic oligonucleotide
  source 1..50: mol_type = other RNA
gccaccccaaaaatgaaggggactaaaacataccacaataaaaacatggg

SEQ ID NO: 310 - RNA, 50 nt, synthetic construct
  misc_feature 1..50: note = Description of Artificial Sequence: Synthetic oligonucleotide
  source 1..50: mol_type = other RNA
gccaccccaaaaatgaaggggactaaaacaggctccatttcattagggtt

SEQ ID NO: 311 - RNA, 50 nt, synthetic construct
  misc_feature 1..50: note = Description of Artificial Sequence: Synthetic oligonucleotide
  source 1..50: mol_type = other RNA
gccaccccaaaaatgaaggggactaaaacatggcacgatggagctattct

SEQ ID NO: 312 - RNA, 50 nt, synthetic construct
  misc_feature 1..50: note = Description of Artificial Sequence: Synthetic oligonucleotide
  source 1..50: mol_type = other RNA
gccaccccaaaaatgaaggggactaaaacacacgatggagctattcttcc

SEQ ID NO: 313 - RNA, 50 nt, synthetic construct
  misc_feature 1..50: note = Description of Artificial Sequence: Synthetic oligonucleotide
  source 1..50: mol_type = other RNA
gccaccccaaaaatgaaggggactaaaacaatgaatccaaatcagaaaat

SEQ ID NO: 314 - RNA, 50 nt, synthetic construct
  misc_feature 1..50: note = Description of Artificial Sequence: Synthetic oligonucleotide
  source 1..50: mol_type = other RNA
gccaccccaaaaatgaaggggactaaaacagatggagctattcttccttt

SEQ ID NO: 315 - RNA, 50 nt, synthetic construct
  misc_feature 1..50: note = Description of Artificial Sequence: Synthetic oligonucleotide
  source 1..50: mol_type = other RNA
gccaccccaaaaatgaaggggactaaaacatggtcaggatacagtggttc

SEQ ID NO: 316 - RNA, 50 nt, synthetic construct
  misc_feature 1..50: note = Description of Artificial Sequence: Synthetic oligonucleotide
  source 1..50: mol_type = other RNA
gccaccccaaaaatgaaggggactaaaacatggccactatcatcaccgcc

SEQ ID NO: 317 - RNA, 50 nt, synthetic construct
  misc_feature 1..50: note = Description of Artificial Sequence: Synthetic oligonucleotide
  source 1..50: mol_type = other RNA
gccaccccaaaaatgaaggggactaaaacattgaacataggactgcatct

SEQ ID NO: 318 - RNA, 50 nt, synthetic construct
  misc_feature 1..50: note = Description of Artificial Sequence: Synthetic oligonucleotide
  source 1..50: mol_type = other RNA
gccaccccaaaaatgaaggggactaaaacaatgttaaaagtgccaaatgc

SEQ ID NO: 319 - RNA, 50 nt, synthetic construct
  misc_feature 1..50: note = Description of Artificial Sequence: Synthetic oligonucleotide
  source 1..50: mol_type = other RNA
gccaccccaaaaatgaaggggactaaaacaatcacccaaataagcaacac

SEQ ID NO: 320 - RNA, 50 nt, synthetic construct
  misc_feature 1..50: note = Description of Artificial Sequence: Synthetic oligonucleotide
  source 1..50: mol_type = other RNA
gccaccccaaaaatgaaggggactaaaacaacagaattcctgggacaatg

SEQ ID NO: 321 - RNA, 50 nt, synthetic construct
  misc_feature 1..50: note = Description of Artificial Sequence: Synthetic oligonucleotide
  source 1..50: mol_type = other RNA
gccaccccaaaaatgaaggggactaaaacaaccagcaatagtatagtatc

SEQ ID NO: 322 - RNA, 41 nt, synthetic construct
  misc_feature 1..41: note = Description of Artificial Sequence: Synthetic oligonucleotide
  source 1..41: mol_type = other RNA
taatttctactaagtgtagatagcaatcctggccactattt

SEQ ID NO: 323 - RNA, 41 nt, synthetic construct
  misc_feature 1..41: note = Description of Artificial Sequence: Synthetic oligonucleotide
  source 1..41: mol_type = other RNA
taatttctactaagtgtagattagttccacctgaaggcatg

SEQ ID NO: 324 - RNA, 41 nt, synthetic construct
  misc_feature 1..41: note = Description of Artificial Sequence: Synthetic oligonucleotide
  source 1..41: mol_type = other RNA
taatttctactaagtgtagatgatgcggtgagtatggcgac

SEQ ID NO: 325 - RNA, 41 nt, synthetic construct
  misc_feature 1..41: note = Description of Artificial Sequence: Synthetic oligonucleotide
  source 1..41: mol_type = other RNA
taatttctactaagtgtagatgggtacttcaatggccgcga

SEQ ID NO: 326 - RNA, 41 nt, synthetic construct
  misc_feature 1..41: note = Description of Artificial Sequence: Synthetic oligonucleotide
  source 1..41: mol_type = other RNA
taatttctactaagtgtagatgcctgaaccctcctagctgt

SEQ ID NO: 327 - RNA, 41 nt, synthetic construct
  misc_feature 1..41: note = Description of Artificial Sequence: Synthetic oligonucleotide
  source 1..41: mol_type = other RNA
taatttctactaagtgtagatcatgaagagcttggcttcca

SEQ ID NO: 328 - RNA, 41 nt, synthetic construct
  misc_feature 1..41: note = Description of Artificial Sequence: Synthetic oligonucleotide
  source 1..41: mol_type = other RNA
taatttctactaagtgtagattacgacgtctacgaatgcgc

SEQ ID NO: 329 - RNA, 41 nt, synthetic construct
  misc_feature 1..41: note = Description of Artificial Sequence: Synthetic oligonucleotide
  source 1..41: mol_type = other RNA
taatttctactaagtgtagatgcgttcgattacctggaagg

SEQ ID NO: 330 - RNA, 41 nt, synthetic construct
  misc_feature 1..41: note = Description of Artificial Sequence: Synthetic oligonucleotide
  source 1..41: mol_type = other RNA
taatttctactaagtgtagatatcggccatgaaggccgcct

SEQ ID NO: 331 - RNA, 41 nt, synthetic construct
  misc_feature 1..41: note = Description of Artificial Sequence: Synthetic oligonucleotide
  source 1..41: mol_type = other RNA
taatttctactaagtgtagatgccactgccatctctttcat

SEQ ID NO: 332 - RNA, 41 nt, synthetic construct
  misc_feature 1..41: note = Description of Artificial Sequence: Synthetic oligonucleotide
  source 1..41: mol_type = other RNA
taatttctactaagtgtagatcgcctgcttggtaggcccag

SEQ ID NO: 333 - RNA, 41 nt, synthetic construct
  misc_feature 1..41: note = Description of Artificial Sequence: Synthetic oligonucleotide
  source 1..41: mol_type = other RNA
taatttctactaagtgtagatcctgaagccttcagcgcgaa

SEQ ID NO: 334 - RNA, 41 nt, synthetic construct
  misc_feature 1..41: note = Description of Artificial Sequence: Synthetic oligonucleotide
  source 1..41: mol_type = other RNA
taatttctactaagtgtagattatcctgaggtttcagtctc

SEQ ID NO: 335 - RNA, 41 nt, synthetic construct
  misc_feature 1..41: note = Description of Artificial Sequence: Synthetic oligonucleotide
  source 1..41: mol_type = other RNA
taatttctactaagtgtagatggatgtgtgatgcttgcttt

SEQ ID NO: 336 - RNA, 41 nt, synthetic construct
  misc_feature 1..41: note = Description of Artificial Sequence: Synthetic oligonucleotide
  source 1..41: mol_type = other RNA
taatttctactaagtgtagatgctcagctgcctaaggaatt

SEQ ID NO: 337 - RNA, 41 nt, synthetic construct
  misc_feature 1..41: note = Description of Artificial Sequence: Synthetic oligonucleotide
  source 1..41: mol_type = other RNA
taatttctactaagtgtagatgatttgggcggcaatgtgaa

SEQ ID NO: 338 - RNA, 41 nt, synthetic construct
  misc_feature 1..41: note = Description of Artificial Sequence: Synthetic oligonucleotide
  source 1..41: mol_type = other RNA
taatttctactaagtgtagatacgcaacaccaggaagtgga

SEQ ID NO: 339 - RNA, 41 nt, synthetic construct
  misc_feature 1..41: note = Description of Artificial Sequence: Synthetic oligonucleotide
  source 1..41: mol_type = other RNA
taatttctactaagtgtagatccgggagccagttccaatta

SEQ ID NO: 340 - RNA, 41 nt, synthetic construct
  misc_feature 1..41: note = Description of Artificial Sequence: Synthetic oligonucleotide
  source 1..41: mol_type = other RNA
taatttctactaagtgtagatagctcgataagggccgcgcg

SEQ ID NO: 341 - RNA, 41 nt, synthetic construct
  misc_feature 1..41: note = Description of Artificial Sequence: Synthetic oligonucleotide
  source 1..41: mol_type = other RNA
taatttctactaagtgtagatgtggcagttgggtcaaccgg

SEQ ID NO: 342 - RNA, 41 nt, synthetic construct
  misc_feature 1..41: note = Description of Artificial Sequence: Synthetic oligonucleotide
  source 1..41: mol_type = other RNA
taatttctactaagtgtagattggtaaaggaccttgcgcat

SEQ ID NO: 343 - RNA, 41 nt, synthetic construct
  misc_feature 1..41: note = Description of Artificial Sequence: Synthetic oligonucleotide
  source 1..41: mol_type = other RNA
taatttctactaagtgtagattgtaatgttctggaagcggc

SEQ ID NO: 344 - RNA, 41 nt, synthetic construct
  misc_feature 1..41: note = Description of Artificial Sequence: Synthetic oligonucleotide
  source 1..41: mol_type = other RNA
taatttctactaagtgtagatgtgggaggagtgcttaatgc

SEQ ID NO: 345 - RNA, 41 nt, synthetic construct
  misc_feature 1..41: note = Description of Artificial Sequence: Synthetic oligonucleotide
  source 1..41: mol_type = other RNA
taatttctactaagtgtagatgcattcctcttgcttagtcc

SEQ ID NO: 346 - RNA, 41 nt, synthetic construct
  misc_feature 1..41: note = Description of Artificial Sequence: Synthetic oligonucleotide
  source 1..41: mol_type = other RNA
taatttctactaagtgtagatctcgtcagttatctcgtctg

SEQ ID NO: 347 - RNA, 41 nt, synthetic construct
  misc_feature 1..41: note = Description of Artificial Sequence: Synthetic oligonucleotide
  source 1..41: mol_type = other RNA
taatttctactaagtgtagatagtatggctgaattctgcct

SEQ ID NO: 348 - RNA, 41 nt, synthetic construct
  misc_feature 1..41: note = Description of Artificial Sequence: Synthetic oligonucleotide
  source 1..41: mol_type = other RNA
taatttctactaagtgtagatctgcaggtgtttgaagatcc

SEQ ID NO: 349 - RNA, 41 nt, synthetic construct
  misc_feature 1..41: note = Description of Artificial Sequence: Synthetic oligonucleotide
  source 1..41: mol_type = other RNA
taatttctactaagtgtagattccaggctcaagaatggagc

SEQ ID NO: 350 - RNA, 41 nt, synthetic construct
  misc_feature 1..41: note = Description of Artificial Sequence: Synthetic oligonucleotide
  source 1..41: mol_type = other RNA
taatttctactaagtgtagatttaaagacgtgctacctgag

SEQ ID NO: 351 - RNA, 41 nt, synthetic construct
  misc_feature 1..41: note = Description of Artificial Sequence: Synthetic oligonucleotide
  source 1..41: mol_type = other RNA
taatttctactaagtgtagatactcctcctatgcgcgatgt

SEQ ID NO: 352 - RNA, 41 nt, synthetic construct
  misc_feature 1..41: note = Description of Artificial Sequence: Synthetic oligonucleotide
  source 1..41: mol_type = other RNA
taatttctactaagtgtagatccagggtgaagtaggtgtcc

SEQ ID NO: 353 - RNA, 41 nt, synthetic construct
  misc_feature 1..41: note = Description of Artificial Sequence: Synthetic oligonucleotide
  source 1..41: mol_type = other RNA
taatttctactaagtgtagatgaacctcttccaaggaagct

SEQ ID NO: 354 - RNA, 41 nt, synthetic construct
  misc_feature 1..41: note = Description of Artificial Sequence: Synthetic oligonucleotide
  source 1..41: mol_type = other RNA
taatttctactaagtgtagatcatcacaagacaagccacag

SEQ ID NO: 355 - RNA, 41 nt, synthetic construct
  misc_feature 1..41: note = Description of Artificial Sequence: Synthetic oligonucleotide
  source 1..41: mol_type = other RNA
taatttctactaagtgtagataagctgatgccagagcagca

SEQ ID NO: 356 - RNA, 41 nt, synthetic construct
  misc_feature 1..41: note = Description of Artificial Sequence: Synthetic oligonucleotide
  source 1..41: mol_type = other RNA
taatttctactaagtgtagatttgatggcttgcaattggcc

SEQ ID NO: 357 - RNA, 41 nt, synthetic construct
  misc_feature 1..41: note = Description of Artificial Sequence: Synthetic oligonucleotide
  source 1..41: mol_type = other RNA
taatttctactaagtgtagattccaccagaccacggaagag

SEQ ID NO: 358 - RNA, 41 nt, synthetic construct
  misc_feature 1..41: note = Description of Artificial Sequence: Synthetic oligonucleotide
  source 1..41: mol_type = other RNA
taatttctactaagtgtagatctccagcgcgcttacaaagt

SEQ ID NO: 359 - RNA, 41 nt, synthetic construct
  misc_feature 1..41: note = Description of Artificial Sequence: Synthetic oligonucleotide
  source 1..41: mol_type = other RNA
taatttctactaagtgtagatctaggggaagatggaggagc

SEQ ID NO: 360 - RNA, 41 nt, synthetic construct
  misc_feature 1..41: note = Description of Artificial Sequence: Synthetic oligonucleotide
  source 1..41: mol_type = other RNA
taatttctactaagtgtagatcctcccagcgattcagagga

SEQ ID NO: 361 - RNA, 41 nt, synthetic construct
  misc_feature 1..41: note = Description of Artificial Sequence: Synthetic oligonucleotide
  source 1..41: mol_type = other RNA
taatttctactaagtgtagattcaccgagcgcggacacaga

SEQ ID NO: 362 - RNA, 41 nt, synthetic construct
  misc_feature 1..41: note = Description of Artificial Sequence: Synthetic oligonucleotide
  source 1..41: mol_type = other RNA
taatttctactaagtgtagatatgaaggccatgtacccggg

SEQ ID NO: 363 - RNA, 41 nt, synthetic construct
  misc_feature 1..41: note = Description of Artificial Sequence: Synthetic oligonucleotide
  source 1..41: mol_type = other RNA
taatttctactaagtgtagattacaagcggccacagtgctc

SEQ ID NO: 364 - RNA, 41 nt, synthetic construct
  misc_feature 1..41: note = Description of Artificial Sequence: Synthetic oligonucleotide
  source 1..41: mol_type = other RNA
taatttctactaagtgtagatttgtccgagagcacgttgta

SEQ ID NO: 365 - RNA, 41 nt, synthetic construct
  misc_feature 1..41: note = Description of Artificial Sequence: Synthetic oligonucleotide
  source 1..41: mol_type = other RNA
taatttctactaagtgtagattctcgttgtagacgacactg

SEQ ID NO: 366 - RNA, 41 nt, synthetic construct
  misc_feature 1..41: note = Description of Artificial Sequence: Synthetic oligonucleotide
  source 1..41: mol_type = other RNA
taatttctactaagtgtagattctcttaatagacgccccac

SEQ ID NO: 367 - RNA, 41 nt, synthetic construct
  misc_feature 1..41: note = Description of Artificial Sequence: Synthetic oligonucleotide
  source 1..41: mol_type = other RNA
taatttctactaagtgtagattcctccccttacaaacagta

SEQ ID NO: 368 - RNA, 41 nt, synthetic construct
  misc_feature 1..41: note = Description of Artificial Sequence: Synthetic oligonucleotide
  source 1..41: mol_type = other RNA
taatttctactaagtgtagatgcactagatgcagcgctgcc

SEQ ID NO: 369 - RNA, 41 nt, synthetic construct
  misc_feature 1..41: note = Description of Artificial Sequence: Synthetic oligonucleotide
  source 1..41: mol_type = other RNA
taatttctactaagtgtagataccacagctgggtatttgga

SEQ ID NO: 370 - RNA, 41 nt, synthetic construct
  misc_feature 1..41: note = Description of Artificial Sequence: Synthetic oligonucleotide
  source 1..41: mol_type = other RNA
taatttctactaagtgtagataaccatgaaggtgtgcctgc

SEQ ID NO: 371 - RNA, 41 nt, synthetic construct
  misc_feature 1..41: note = Description of Artificial Sequence: Synthetic oligonucleotide
  source 1..41: mol_type = other RNA
taatttctactaagtgtagataatacccagcgaaaacgctg

SEQ ID NO: 372 - RNA, 41 nt, synthetic construct
  misc_feature 1..41: note = Description of Artificial Sequence: Synthetic oligonucleotide
  source 1..41: mol_type = other RNA
taatttctactaagtgtagatgctccacgattaaatcctac

SEQ ID NO: 373 - RNA, 41 nt, synthetic construct
  misc_feature 1..41: note = Description of Artificial Sequence: Synthetic oligonucleotide
  source 1..41: mol_type = other RNA
taatttctactaagtgtagatggtcaacatgtatctgagcc

SEQ ID NO: 374 - RNA, 50 nt, synthetic construct
  misc_feature 1..50: note = Description of Artificial Sequence: Synthetic oligonucleotide
  source 1..50: mol_type = other RNA
gccaccccaaaaatgaaggggactaaaacacccccgctaccgggcacgtt

SEQ ID NO: 375 - RNA, 50 nt, synthetic construct
  misc_feature 1..50: note = Description of Artificial Sequence: Synthetic oligonucleotide
  source 1..50: mol_type = other RNA
gccaccccaaaaatgaaggggactaaaacagctaccgggcacgttccgat

SEQ ID NO: 376 - RNA, 50 nt, synthetic construct
  misc_feature 1..50: note = Description of Artificial Sequence: Synthetic oligonucleotide
  source 1..50: mol_type = other RNA
gccaccccaaaaatgaaggggactaaaacaacactctagctcggtagtta

SEQ ID NO: 377 - RNA, 50 nt, synthetic construct
  misc_feature 1..50: note = Description of Artificial Sequence: Synthetic oligonucleotide
  source 1..50: mol_type = other RNA
gccaccccaaaaatgaaggggactaaaacaacacacccgcagcttcggtt

SEQ ID NO: 378 - RNA, 50 nt, synthetic construct
  misc_feature 1..50: note = Description of Artificial Sequence: Synthetic oligonucleotide
  source 1..50: mol_type = other RNA
gccaccccaaaaatgaaggggactaaaacatacatagtacacacccgcag

SEQ ID NO: 379 - RNA, 50 nt, synthetic construct
  misc_feature 1..50: note = Description of Artificial Sequence: Synthetic oligonucleotide
  source 1..50: mol_type = other RNA
gccaccccaaaaatgaaggggactaaaacacgtgtacatagtacacaccc

SEQ ID NO: 380 - RNA, 50 nt, synthetic construct
  misc_feature 1..50: note = Description of Artificial Sequence: Synthetic oligonucleotide
  source 1..50: mol_type = other RNA
gccaccccaaaaatgaaggggactaaaacatcgcgctgaaggcttcaggt

SEQ ID NO: 381 - RNA, 50 nt, synthetic construct
  misc_feature 1..50: note = Description of Artificial Sequence: Synthetic oligonucleotide
  source 1..50: mol_type = other RNA
gccaccccaaaaatgaaggggactaaaacaatcgtcttgcggtccagcat

SEQ ID NO: 382 - RNA, 50 nt, synthetic construct
  misc_feature 1..50: note = Description of Artificial Sequence: Synthetic oligonucleotide
  source 1..50: mol_type = other RNA
gccaccccaaaaatgaaggggactaaaacagatcgtcttgcggtccagca

SEQ ID NO: 383 - RNA, 50 nt, synthetic construct
  misc_feature 1..50: note = Description of Artificial Sequence: Synthetic oligonucleotide
  source 1..50: mol_type = other RNA
gccaccccaaaaatgaaggggactaaaacactaccgcgcgcactaaaagt

SEQ ID NO: 384 - RNA, 50 nt, synthetic construct
  misc_feature 1..50: note = Description of Artificial Sequence: Synthetic oligonucleotide
  source 1..50: mol_type = other RNA
gccaccccaaaaatgaaggggactaaaacagcgcactaaaagtgcacacc

SEQ ID NO: 385 - RNA, 50 nt, synthetic construct
  misc_feature 1..50: note = Description of Artificial Sequence: Synthetic oligonucleotide
  source 1..50: mol_type = other RNA
gccaccccaaaaatgaaggggactaaaacagcgcgcactaaaagtgcaca

SEQ ID NO: 386 - RNA, 50 nt, synthetic construct
  misc_feature 1..50: note = Description of Artificial Sequence: Synthetic oligonucleotide
  source 1..50: mol_type = other RNA
gccaccccaaaaatgaaggggactaaaacactacaactggcagcgacccc

SEQ ID NO: 387 - RNA, 50 nt, synthetic construct
  misc_feature 1..50: note = Description of Artificial Sequence: Synthetic oligonucleotide
  source 1..50: mol_type = other RNA
gccaccccaaaaatgaaggggactaaaacaaccactacaactggcagcga

SEQ ID NO: 388 - RNA, 50 nt, synthetic construct
  misc_feature 1..50: note = Description of Artificial Sequence: Synthetic oligonucleotide
  source 1..50: mol_type = other RNA
gccaccccaaaaatgaaggggactaaaacatacaactggcagcgacccca

SEQ ID NO: 389 - RNA, 50 nt, synthetic construct
  misc_feature 1..50: note = Description of Artificial Sequence: Synthetic oligonucleotide
  source 1..50: mol_type = other RNA
gccaccccaaaaatgaaggggactaaaacatattccgctttgctcggcct

SEQ ID NO: 390 - RNA, 50 nt, synthetic construct
  misc_feature 1..50: note = Description of Artificial Sequence: Synthetic oligonucleotide
  source 1..50: mol_type = other RNA
gccaccccaaaaatgaaggggactaaaacaagcaacttgcgatccagcat

SEQ ID NO: 391 - RNA, 50 nt, synthetic construct
  misc_feature 1..50: note = Description of Artificial Sequence: Synthetic oligonucleotide
  source 1..50: mol_type = other RNA
gccaccccaaaaatgaaggggactaaaacaggctattccgctttgctcgg

SEQ ID NO: 392 - RNA, 50 nt, synthetic construct
  misc_feature 1..50: note = Description of Artificial Sequence: Synthetic oligonucleotide
  source 1..50: mol_type = other RNA
gccaccccaaaaatgaaggggactaaaacaggtcatcagggtgttggatg

SEQ ID NO: 393 - RNA, 50 nt, synthetic construct
  misc_feature 1..50: note = Description of Artificial Sequence: Synthetic oligonucleotide
  source 1..50: mol_type = other RNA
gccaccccaaaaatgaaggggactaaaacagatggctcgccgggtagggc

SEQ ID NO: 394 - RNA, 50 nt, synthetic construct
  misc_feature 1..50: note = Description of Artificial Sequence: Synthetic oligonucleotide
  source 1..50: mol_type = other RNA
gccaccccaaaaatgaaggggactaaaacaccgggtagggcggccaattg

SEQ ID NO: 395 - RNA, 50 nt, synthetic construct
  misc_feature 1..50: note = Description of Artificial Sequence: Synthetic oligonucleotide
  source 1..50: mol_type = other RNA
gccaccccaaaaatgaaggggactaaaacagataccgactcggcgctgcg

SEQ ID NO: 396 - RNA, 50 nt, synthetic construct
  misc_feature 1..50: note = Description of Artificial Sequence: Synthetic oligonucleotide
  source 1..50: mol_type = other RNA
gccaccccaaaaatgaaggggactaaaacaataataacaattggctcaat

SEQ ID NO: 397 - RNA, 50 nt, synthetic construct
  misc_feature 1..50: note = Description of Artificial Sequence: Synthetic oligonucleotide
  source 1..50: mol_type = other RNA
gccaccccaaaaatgaaggggactaaaacaataacaattggctcaatatc

SEQ ID NO: 398 - RNA, 50 nt, synthetic construct
  misc_feature 1..50: note = Description of Artificial Sequence: Synthetic oligonucleotide
  source 1..50: mol_type = other RNA
gccaccccaaaaatgaaggggactaaaacaacaattggctcaatatcatt

SEQ ID NO: 399 - RNA, 50 nt, synthetic construct
  misc_feature 1..50: note = Description of Artificial Sequence: Synthetic oligonucleotide
  source 1..50: mol_type = other RNA
gccaccccaaaaatgaaggggactaaaacacgctcgttgcgggacttaac

SEQ ID NO: 400 - RNA, 50 nt, synthetic construct
  misc_feature 1..50: note = Description of Artificial Sequence: Synthetic oligonucleotide
  source 1..50: mol_type = other RNA
gccaccccaaaaatgaaggggactaaaacatggcgcgatgattctcgatt

SEQ ID NO: 401 - RNA, 50 nt, synthetic construct
  misc_feature 1..50: note = Description of Artificial Sequence: Synthetic oligonucleotide
  source 1..50: mol_type = other RNA
gccaccccaaaaatgaaggggactaaaacaggtctgggctgttcccctct

SEQ ID NO: 402 - RNA, 50 nt, synthetic construct
  misc_feature 1..50: note = Description of Artificial Sequence: Synthetic oligonucleotide
  source 1..50: mol_type = other RNA
gccaccccaaaaatgaaggggactaaaacacgactgggttgtagcaaaac

SEQ ID NO: 403 - RNA, 50 nt, synthetic construct
  misc_feature 1..50: note = Description of Artificial Sequence: Synthetic oligonucleotide
  source 1..50: mol_type = other RNA
gccaccccaaaaatgaaggggactaaaacagtatcagtgttcccgaaggc

SEQ ID NO: 404 - RNA, 50 nt, synthetic construct
  misc_feature 1..50: note = Description of Artificial Sequence: Synthetic oligonucleotide
  source 1..50: mol_type = other RNA
gccaccccaaaaatgaaggggactaaaacaagggtggctgcttctaagcc

SEQ ID NO: 405 - RNA, 50 nt, synthetic construct
  misc_feature 1..50: note = Description of Artificial Sequence: Synthetic oligonucleotide
  source 1..50: mol_type = other RNA
gccaccccaaaaatgaaggggactaaaacaaggggaagcctttttaactg

SEQ ID NO: 406 - RNA, 50 nt, synthetic construct
  misc_feature 1..50: note = Description of Artificial Sequence: Synthetic oligonucleotide
  source 1..50: mol_type = other RNA
gccaccccaaaaatgaaggggactaaaacatataaggtagattggatacg

SEQ ID NO: 407 - RNA, 50 nt, synthetic construct
  misc_feature 1..50: note = Description of Artificial Sequence: Synthetic oligonucleotide
  source 1..50: mol_type = other RNA
gccaccccaaaaatgaaggggactaaaacaggtttgggagattctcactc

SEQ ID NO: 408 - RNA, 50 nt, synthetic construct
  misc_feature 1..50: note = Description of Artificial Sequence: Synthetic oligonucleotide
  source 1..50: mol_type = other RNA
gccaccccaaaaatgaaggggactaaaacacggtttgggagattctcact

SEQ ID NO: 409 - RNA, 50 nt, synthetic construct
  misc_feature 1..50: note = Description of Artificial Sequence: Synthetic oligonucleotide
  source 1..50: mol_type = other RNA
gccaccccaaaaatgaaggggactaaaacaaccgggttgaggtgggaaac

SEQ ID NO: 410 - RNA, 50 nt, synthetic construct
  misc_feature 1..50: note = Description of Artificial Sequence: Synthetic oligonucleotide
  source 1..50: mol_type = other RNA
gccaccccaaaaatgaaggggactaaaacacccggtatggcgcctcgtcc

SEQ ID NO: 411 - RNA, 50 nt, synthetic construct
  misc_feature 1..50: note = Description of Artificial Sequence: Synthetic oligonucleotide
  source 1..50: mol_type = other RNA
gccaccccaaaaatgaaggggactaaaacaggtgacggggaatcagggtt

SEQ ID NO: 412 - RNA, 50 nt, synthetic construct
  misc_feature 1..50: note = Description of Artificial Sequence: Synthetic oligonucleotide
  source 1..50: mol_type = other RNA
gccaccccaaaaatgaaggggactaaaacatgtccgggccgggtgaggtt

SEQ ID NO: 413 - RNA, 50 nt, synthetic construct
  misc_feature 1..50: note = Description of Artificial Sequence: Synthetic oligonucleotide
  source 1..50: mol_type = other RNA
gccaccccaaaaatgaaggggactaaaacagggctgaccgggttggtttt

SEQ ID NO: 414 - RNA, 50 nt, synthetic construct
  misc_feature 1..50: note = Description of Artificial Sequence: Synthetic oligonucleotide
  source 1..50: mol_type = other RNA
gccaccccaaaaatgaaggggactaaaacacgccgctgcggggtgggccc

SEQ ID NO: 415 - RNA, 50 nt, synthetic construct
  misc_feature 1..50: note = Description of Artificial Sequence: Synthetic oligonucleotide
  source 1..50: mol_type = other RNA
gccaccccaaaaatgaaggggactaaaacaagcctgggtgcggggctccg

SEQ ID NO: 416 - RNA, 50 nt, synthetic construct
  misc_feature 1..50: note = Description of Artificial Sequence: Synthetic oligonucleotide
  source 1..50: mol_type = other RNA
gccaccccaaaaatgaaggggactaaaacagtgtgtggggagaagggatg

SEQ ID NO: 417 - RNA, 50 nt, synthetic construct
  misc_feature 1..50: note = Description of Artificial Sequence: Synthetic oligonucleotide
  source 1..50: mol_type = other RNA
gccaccccaaaaatgaaggggactaaaacacaaagtgctgggattacagg

SEQ ID NO: 418 - RNA, 50 nt, synthetic construct
  misc_feature 1..50: note = Description of Artificial Sequence: Synthetic oligonucleotide
  source 1..50: mol_type = other RNA
gccaccccaaaaatgaaggggactaaaacacccagcactttgggaggctg

SEQ ID NO: 419 - RNA, 50 nt, synthetic construct
  misc_feature 1..50: note = Description of Artificial Sequence: Synthetic oligonucleotide
  source 1..50: mol_type = other RNA
gccaccccaaaaatgaaggggactaaaacaaaagtgctgggattacaggc

SEQ ID NO: 420 - RNA, 50 nt, synthetic construct
  misc_feature 1..50: note = Description of Artificial Sequence: Synthetic oligonucleotide
  source 1..50: mol_type = other RNA
gccaccccaaaaatgaaggggactaaaacagcctcccaaagtgctgggat

SEQ ID NO: 421 - RNA, 50 nt, synthetic construct
  misc_feature 1..50: note = Description of Artificial Sequence: Synthetic oligonucleotide
  source 1..50: mol_type = other RNA
gccaccccaaaaatgaaggggactaaaacaagcactttgggaggccaagg

SEQ ID NO: 422 - RNA, 50 nt, synthetic construct
  misc_feature 1..50: note = Description of Artificial Sequence: Synthetic oligonucleotide
  source 1..50: mol_type = other RNA
gccaccccaaaaatgaaggggactaaaacactccccgaagggcggggtcc

SEQ ID NO: 423 - RNA, 50 nt, synthetic construct
  misc_feature 1..50: note = Description of Artificial Sequence: Synthetic oligonucleotide
  source 1..50: mol_type = other RNA
gccaccccaaaaatgaaggggactaaaacagcccctccccgaagggcggg

SEQ ID NO: 424 - RNA, 50 nt, synthetic construct
  misc_feature 1..50: note = Description of Artificial Sequence: Synthetic oligonucleotide
  source 1..50: mol_type = other RNA
gccaccccaaaaatgaaggggactaaaacaggaggcatccgccgggcccc

SEQ ID NO: 425 - RNA, 50 nt, synthetic construct
  misc_feature 1..50: note = Description of Artificial Sequence: Synthetic oligonucleotide
  source 1..50: mol_type = other RNA
gccaccccaaaaatgaaggggactaaaacatctgaactcactttccatcc

SEQ ID NO: 426 - RNA, 50 nt, synthetic construct
  misc_feature 1..50: note = Description of Artificial Sequence: Synthetic oligonucleotide
  source 1..50: mol_type = other RNA
gccaccccaaaaatgaaggggactaaaacaccacgttccatccaactttt

SEQ ID NO: 427 - RNA, 50 nt, synthetic construct
  misc_feature 1..50: note = Description of Artificial Sequence: Synthetic oligonucleotide
  source 1..50: mol_type = other RNA
gccaccccaaaaatgaaggggactaaaacagcaagtaaagtttgaaacct

SEQ ID NO: 428 - RNA, 50 nt, synthetic construct
  misc_feature 1..50: note = Description of Artificial Sequence: Synthetic oligonucleotide
  source 1..50: mol_type = other RNA
gccaccccaaaaatgaaggggactaaaacagtttaaaacctagtgatgtt

SEQ ID NO: 429 - RNA, 50 nt, synthetic construct
  misc_feature 1..50: note = Description of Artificial Sequence: Synthetic oligonucleotide
  source 1..50: mol_type = other RNA
gccaccccaaaaatgaaggggactaaaacaacatgtatagcatggaacca

SEQ ID NO: 430 - RNA, 50 nt, synthetic construct
  misc_feature 1..50: note = Description of Artificial Sequence: Synthetic oligonucleotide
  source 1..50: mol_type = other RNA
gccaccccaaaaatgaaggggactaaaacagatatcatggaaccaagtaa

SEQ ID NO: 431 - RNA, 50 nt, synthetic construct
  misc_feature 1..50: note = Description of Artificial Sequence: Synthetic oligonucleotide
  source 1..50: mol_type = other RNA
gccaccccaaaaatgaaggggactaaaacataaacacccaaaaatggatc

SEQ ID NO: 432 - RNA, 50 nt, synthetic construct
  misc_feature 1..50: note = Description of Artificial Sequence: Synthetic oligonucleotide
  source 1..50: mol_type = other RNA
gccaccccaaaaatgaaggggactaaaacagtaaacacccaaaaatggat

SEQ ID NO: 433 - RNA, 50 nt, synthetic construct
  misc_feature 1..50: note = Description of Artificial Sequence: Synthetic oligonucleotide
  source 1..50: mol_type = other RNA
gccaccccaaaaatgaaggggactaaaacaactgaagcattaatgccaga

SEQ ID NO: 434 - RNA, 50 nt, synthetic construct
  misc_feature 1..50: note = Description of Artificial Sequence: Synthetic oligonucleotide
  source 1..50: mol_type = other RNA
gccaccccaaaaatgaaggggactaaaacaaagtaagcattaatgccaga

SEQ ID NO: 435 - RNA, 50 nt, synthetic construct
  misc_feature 1..50: note = Description of Artificial Sequence: Synthetic oligonucleotide
  source 1..50: mol_type = other RNA
gccaccccaaaaatgaaggggactaaaacacatcctgataaagaacagca

SEQ ID NO: 436 - RNA, 50 nt, synthetic construct
  misc_feature 1..50: note = Description of Artificial Sequence: Synthetic oligonucleotide
  source 1..50: mol_type = other RNA
gccaccccaaaaatgaaggggactaaaacacaccttgataaagaacagca

SEQ ID NO: 437 - RNA, 50 nt, synthetic construct
  misc_feature 1..50: note = Description of Artificial Sequence: Synthetic oligonucleotide
  source 1..50: mol_type = other RNA
gccaccccaaaaatgaaggggactaaaacattgtaagattaacacactga

SEQ ID NO: 438 - RNA, 50 nt, synthetic construct
  misc_feature 1..50: note = Description of Artificial Sequence: Synthetic oligonucleotide
  source 1..50: mol_type = other RNA
gccaccccaaaaatgaaggggactaaaacattctgagattaacacactga

SEQ ID NO: 439 - RNA, 50 nt, synthetic construct
  misc_feature 1..50: note = Description of Artificial Sequence: Synthetic oligonucleotide
  source 1..50: mol_type = other RNA
gccaccccaaaaatgaaggggactaaaacatatcaaacctcttagtacca

SEQ ID NO: 440 - RNA, 50 nt, synthetic construct
  misc_feature 1..50: note = Description of Artificial Sequence: Synthetic oligonucleotide
  source 1..50: mol_type = other RNA
gccaccccaaaaatgaaggggactaaaacatagcgaacctcttagtacca

SEQ ID NO: 441 - RNA, 50 nt, synthetic construct
  misc_feature 1..50: note = Description of Artificial Sequence: Synthetic oligonucleotide
  source 1..50: mol_type = other RNA
gccaccccaaaaatgaaggggactaaaacagatcacgcactaaattaata

SEQ ID NO: 442 - RNA, 50 nt, synthetic construct
  misc_feature 1..50: note = Description of Artificial Sequence: Synthetic oligonucleotide
  source 1..50: mol_type = other RNA
gccaccccaaaaatgaaggggactaaaacagaccgcgcactaaattaata

SEQ ID NO: 443 - RNA, 50 nt, synthetic construct
  misc_feature 1..50: note = Description of Artificial Sequence: Synthetic oligonucleotide
  source 1..50: mol_type = other RNA
gccaccccaaaaatgaaggggactaaaacattcaacaccattacaaggtg

SEQ ID NO: 444 - RNA, 50 nt, synthetic construct
  misc_feature 1..50: note = Description of Artificial Sequence: Synthetic oligonucleotide
  source 1..50: mol_type = other RNA
gccaccccaaaaatgaaggggactaaaacatttagcaccattacaaggtg

SEQ ID NO: 445 - RNA, 50 nt, synthetic construct
  misc_feature 1..50: note = Description of Artificial Sequence: Synthetic oligonucleotide
  source 1..50: mol_type = other RNA
gccaccccaaaaatgaaggggactaaaacagaggagaattagtctgagtc

SEQ ID NO: 446 - RNA, 50 nt, synthetic construct
  misc_feature 1..50: note = Description of Artificial Sequence: Synthetic oligonucleotide
  source 1..50: mol_type = other RNA
gccaccccaaaaatgaaggggactaaaacagatgggaattagtctgagtc

SEQ ID NO: 447 - RNA, 50 nt, synthetic construct
  misc_feature 1..50: note = Description of Artificial Sequence: Synthetic oligonucleotide
  source 1..50: mol_type = other RNA
gccaccccaaaaatgaaggggactaaaacagaggggaattagtctgagtc

SEQ ID NO: 448 - RNA, 50 nt, synthetic construct
  misc_feature 1..50: note = Description of Artificial Sequence: Synthetic oligonucleotide
  source 1..50: mol_type = other RNA
gccaccccaaaaatgaaggggactaaaacagacgtgaattagtctgagtc

SEQ ID NO: 449 - RNA, 50 nt, synthetic construct
  misc_feature 1..50: note = Description of Artificial Sequence: Synthetic oligonucleotide
  source 1..50: mol_type = other RNA
gccaccccaaaaatgaaggggactaaaacactgcaccaagtgacatagtg

SEQ ID NO: 450 - RNA, 50 nt, synthetic construct
  misc_feature 1..50: note = Description of Artificial Sequence: Synthetic oligonucleotide
  source 1..50: mol_type = other RNA
gccaccccaaaaatgaaggggactaaaacactacgccaagtgacatagtg

SEQ ID NO: 451 - RNA, 50 nt, synthetic construct
  misc_feature 1..50: note = Description of Artificial Sequence: Synthetic oligonucleotide
  source 1..50: mol_type = other RNA
gccaccccaaaaatgaaggggactaaaacattgtgggtatggcaatagag

SEQ ID NO: 452 - RNA, 50 nt, synthetic construct
  misc_feature 1..50: note = Description of Artificial Sequence: Synthetic oligonucleotide
  source 1..50: mol_type = other RNA
gccaccccaaaaatgaaggggactaaaacattattggtatggcaatagag

SEQ ID NO: 453 - RNA, 50 nt, synthetic construct
  misc_feature 1..50: note = Description of Artificial Sequence: Synthetic oligonucleotide
  source 1..50: mol_type = other RNA
gccaccccaaaaatgaaggggactaaaacatgaaaggatatcatttaaaa

SEQ ID NO: 454 - RNA, 50 nt, synthetic construct
  misc_feature 1..50: note = Description of Artificial Sequence: Synthetic oligonucleotide
  source 1..50: mol_type = other RNA
gccaccccaaaaatgaaggggactaaaacatgcacggatatcatttaaaa

SEQ ID NO: 455 - RNA, 50 nt, synthetic construct
  misc_feature 1..50: note = Description of Artificial Sequence: Synthetic oligonucleotide
  source 1..50: mol_type = other RNA
gccaccccaaaaatgaaggggactaaaacagtctgtagtaatgatttgtg

SEQ ID NO: 456 - RNA, 50 nt, synthetic construct
  misc_feature 1..50: note = Description of Artificial Sequence: Synthetic oligonucleotide
  source 1..50: mol_type = other RNA
gccaccccaaaaatgaaggggactaaaacagtgtatagtaatgatttgtg

SEQ ID NO: 457 - RNA, 50 nt, synthetic construct
  misc_feature 1..50: note = Description of Artificial Sequence: Synthetic oligonucleotide
  source 1..50: mol_type = other RNA
gccaccccaaaaatgaaggggactaaaacacagcaatgtctctgccaaat

SEQ ID NO: 458 - RNA, 50 nt, synthetic construct
  misc_feature 1..50: note = Description of Artificial Sequence: Synthetic oligonucleotide
  source 1..50: mol_type = other RNA
gccaccccaaaaatgaaggggactaaaacacatcgatgtctctgccaaat

SEQ ID NO: 459 - RNA, 50 nt, synthetic construct
  misc_feature 1..50: note = Description of Artificial Sequence: Synthetic oligonucleotide
  source 1..50: mol_type = other RNA
gccaccccaaaaatgaaggggactaaaacacggagaggattatggaatgc

SEQ ID NO: 460 - RNA, 50 nt, synthetic construct
  misc_feature 1..50: note = Description of Artificial Sequence: Synthetic oligonucleotide
  source 1..50: mol_type = other RNA
gccaccccaaaaatgaaggggactaaaacaagttaggttcggagaggatt

SEQ ID NO: 461 - RNA, 50 nt, synthetic construct
  misc_feature 1..50: note = Description of Artificial Sequence: Synthetic oligonucleotide
  source 1..50: mol_type = other RNA
gccaccccaaaaatgaaggggactaaaacaaagtggggagttaggttcgg

SEQ ID NO: 462 - RNA, 50 nt, synthetic construct
  misc_feature 1..50: note = Description of Artificial Sequence: Synthetic oligonucleotide
  source 1..50: mol_type = other RNA
gccaccccaaaaatgaaggggactaaaacacggccatgatgccgagaagg

SEQ ID NO: 463 - RNA, 50 nt, synthetic construct
  misc_feature 1..50: note = Description of Artificial Sequence: Synthetic oligonucleotide
  source 1..50: mol_type = other RNA
gccaccccaaaaatgaaggggactaaaacagggcggccatgatgccgaga

SEQ ID NO: 464 - RNA, 50 nt, synthetic construct
  misc_feature 1..50: note = Description of Artificial Sequence: Synthetic oligonucleotide
  source 1..50: mol_type = other RNA
gccaccccaaaaatgaaggggactaaaacacatgatgccgagaaggagat

SEQ ID NO: 465 - RNA, 50 nt, synthetic construct
  misc_feature 1..50: note = Description of Artificial Sequence: Synthetic oligonucleotide
  source 1..50: mol_type = other RNA
gccaccccaaaaatgaaggggactaaaacattctcatcgaagtctcctct

SEQ ID NO: 466 - RNA, 50 nt, synthetic construct
  misc_feature 1..50: note = Description of Artificial Sequence: Synthetic oligonucleotide
  source 1..50: mol_type = other RNA
gccaccccaaaaatgaaggggactaaaacatctcatcgaagtctcctctc

SEQ ID NO: 467 - RNA, 50 nt, synthetic construct
  misc_feature 1..50: note = Description of Artificial Sequence: Synthetic oligonucleotide
  source 1..50: mol_type = other RNA
gccaccccaaaaatgaaggggactaaaacagattctcatcgaagtctcct

SEQ ID NO: 468 - RNA, 50 nt, synthetic construct
  misc_feature 1..50: note = Description of Artificial Sequence: Synthetic oligonucleotide
  source 1..50: mol_type = other RNA
gccaccccaaaaatgaaggggactaaaacagcgaccaaatcgccgtagag

SEQ ID NO: 469 - RNA, 50 nt, synthetic construct
  misc_feature 1..50: note = Description of Artificial Sequence: Synthetic oligonucleotide
  source 1..50: mol_type = other RNA
gccaccccaaaaatgaaggggactaaaacaaagcgaccaaatcgccgtag

SEQ ID NO: 470 - RNA, 50 nt, synthetic construct
  misc_feature 1..50: note = Description of Artificial Sequence: Synthetic oligonucleotide
  source 1..50: mol_type = other RNA
gccaccccaaaaatgaaggggactaaaacatgtcaaagcgaccaaatcgc

SEQ ID NO: 471 - RNA, 50 nt, synthetic construct
  misc_feature 1..50: note = Description of Artificial Sequence: Synthetic oligonucleotide
  source 1..50: mol_type = other RNA
gccaccccaaaaatgaaggggactaaaacattcctcttgcggccacttgg

SEQ ID NO: 472 - RNA, 50 nt, synthetic construct
  misc_feature 1..50: note = Description of Artificial Sequence: Synthetic oligonucleotide
  source 1..50: mol_type = other RNA
gccaccccaaaaatgaaggggactaaaacagcggccacttgggccttgag

SEQ ID NO: 473 - RNA, 50 nt, synthetic construct
  misc_feature 1..50: note = Description of Artificial Sequence: Synthetic oligonucleotide
  source 1..50: mol_type = other RNA
gccaccccaaaaatgaaggggactaaaacacggccacttgggccttgaga

SEQ ID NO: 474 - RNA, 50 nt, synthetic construct
  misc_feature 1..50: note = Description of Artificial Sequence: Synthetic oligonucleotide
  source 1..50: mol_type = other RNA
gccaccccaaaaatgaaggggactaaaacaacggctcgaccctcggtgta

SEQ ID NO: 475 - RNA, 50 nt, synthetic construct
  misc_feature 1..50: note = Description of Artificial Sequence: Synthetic oligonucleotide
  source 1..50: mol_type = other RNA
gccaccccaaaaatgaaggggactaaaacacggctcgaccctcggtgtag

SEQ ID NO: 476 - RNA, 50 nt, synthetic construct
  misc_feature 1..50: note = Description of Artificial Sequence: Synthetic oligonucleotide
  source 1..50: mol_type = other RNA
gccaccccaaaaatgaaggggactaaaacatcgaccctcggtgtagttga

SEQ ID NO: 477 - RNA, 50 nt, synthetic construct
  misc_feature 1..50: note = Description of Artificial Sequence: Synthetic oligonucleotide
  source 1..50: mol_type = other RNA
gccaccccaaaaatgaaggggactaaaacatcttatagacgttccggacg

SEQ ID NO: 478 - RNA, 50 nt, synthetic construct
  misc_feature 1..50: note = Description of Artificial Sequence: Synthetic oligonucleotide
  source 1..50: mol_type = other RNA
gccaccccaaaaatgaaggggactaaaacatagacgttccggacgggcat

SEQ ID NO: 479 - RNA, 50 nt, synthetic construct
  misc_feature 1..50: note = Description of Artificial Sequence: Synthetic oligonucleotide
  source 1..50: mol_type = other RNA
gccaccccaaaaatgaaggggactaaaacattatagacgttccggacggg

SEQ ID NO: 480 - RNA, 50 nt, synthetic construct
  misc_feature 1..50: note = Description of Artificial Sequence: Synthetic oligonucleotide
  source 1..50: mol_type = other RNA
gccaccccaaaaatgaaggggactaaaacagatacatgtggcgatcgatc

SEQ ID NO: 481 - RNA, 50 nt, synthetic construct
  misc_feature 1..50: note = Description of Artificial Sequence: Synthetic oligonucleotide
  source 1..50: mol_type = other RNA
gccaccccaaaaatgaaggggactaaaacagtgatacatgtggcgatcga

SEQ ID NO: 482 - RNA, 50 nt, synthetic construct
  misc_feature 1..50: note = Description of Artificial Sequence: Synthetic oligonucleotide
  source 1..50: mol_type = other RNA
gccaccccaaaaatgaaggggactaaaacaccgcttacctatgcccatgt

SEQ ID NO: 483 - RNA, 50 nt, synthetic construct
  misc_feature 1..50: note = Description of Artificial Sequence: Synthetic oligonucleotide
  source 1..50: mol_type = other RNA
gccaccccaaaaatgaaggggactaaaacaccgatgacaccaagagcgat

SEQ ID NO: 484 - RNA, 50 nt, synthetic construct
  misc_feature 1..50: note = Description of Artificial Sequence: Synthetic oligonucleotide
  source 1..50: mol_type = other RNA
gccaccccaaaaatgaaggggactaaaacagtccgatgacaccaagagcg

SEQ ID NO: 485 - RNA, 50 nt, synthetic construct
  misc_feature 1..50: note = Description of Artificial Sequence: Synthetic oligonucleotide
  source 1..50: mol_type = other RNA
gccaccccaaaaatgaaggggactaaaacaacggtagctttcttcgcttc

SEQ ID NO: 486 - RNA, 50 nt, synthetic construct
  misc_feature 1..50: note = Description of Artificial Sequence: Synthetic oligonucleotide
  source 1..50: mol_type = other RNA
gccaccccaaaaatgaaggggactaaaacatcaaacgcggccgctgcgct

SEQ ID NO: 487 - RNA, 50 nt, synthetic construct
  misc_feature 1..50: note = Description of Artificial Sequence: Synthetic oligonucleotide
  source 1..50: mol_type = other RNA
gccaccccaaaaatgaaggggactaaaacaggtcatccttcaaacgcggc

SEQ ID NO: 488 - RNA, 50 nt, synthetic construct
  misc_feature 1..50: note = Description of Artificial Sequence: Synthetic oligonucleotide
  source 1..50: mol_type = other RNA
gccaccccaaaaatgaaggggactaaaacacttcaaacgcggccgctgcg

SEQ ID NO: 489 - RNA, 50 nt, synthetic construct
  misc_feature 1..50: note = Description of Artificial Sequence: Synthetic oligonucleotide
  source 1..50: mol_type = other RNA
gccaccccaaaaatgaaggggactaaaacagcgggagccattctgcagcg

SEQ ID NO: 490 - RNA, 50 nt, synthetic construct
  misc_feature 1..50: note = Description of Artificial Sequence: Synthetic oligonucleotide
  source 1..50: mol_type = other RNA
gccaccccaaaaatgaaggggactaaaacaggagccattctgcagcgtcc

SEQ ID NO: 491 - RNA, 50 nt, synthetic construct
  misc_feature 1..50: note = Description of Artificial Sequence: Synthetic oligonucleotide
  source 1..50: mol_type = other RNA
gccaccccaaaaatgaaggggactaaaacagccattctgcagcgtccaag

SEQ ID NO: 492 - RNA, 50 nt, synthetic construct
  misc_feature 1..50: note = Description of Artificial Sequence: Synthetic oligonucleotide
  source 1..50: mol_type = other RNA
gccaccccaaaaatgaaggggactaaaacaacgtttggccatgtcgccgc

SEQ ID NO: 493 - RNA, 50 nt, synthetic construct
  misc_feature 1..50: note = Description of Artificial Sequence: Synthetic oligonucleotide
  source 1..50: mol_type = other RNA
gccaccccaaaaatgaaggggactaaaacatacgtttggccatgtcgccg

SEQ ID NO: 494 - RNA, 50 nt, synthetic construct
  misc_feature 1..50: note = Description of Artificial Sequence: Synthetic oligonucleotide
  source 1..50: mol_type = other RNA
gccaccccaaaaatgaaggggactaaaacattggccatgtcgccgcgacc

SEQ ID NO: 495 - RNA, 50 nt, synthetic construct
  misc_feature 1..50: note = Description of Artificial Sequence: Synthetic oligonucleotide
  source 1..50: mol_type = other RNA
gccaccccaaaaatgaaggggactaaaacagggacggcccccaaccaaca

SEQ ID NO: 496 - RNA, 50 nt, synthetic construct
  misc_feature 1..50: note = Description of Artificial Sequence: Synthetic oligonucleotide
  source 1..50: mol_type = other RNA
gccaccccaaaaatgaaggggactaaaacagactccagcgactttttcgt

SEQ ID NO: 497 - RNA, 50 nt, synthetic construct
  misc_feature 1..50: note = Description of Artificial Sequence: Synthetic oligonucleotide
  source 1..50: mol_type = other RNA
gccaccccaaaaatgaaggggactaaaacacggcccccaaccaacagcag

SEQ ID NO: 498 - RNA, 50 nt, synthetic construct
  misc_feature 1..50: note = Description of Artificial Sequence: Synthetic oligonucleotide
  source 1..50: mol_type = other RNA
gccaccccaaaaatgaaggggactaaaacacgcttctccttagcctcctt

SEQ ID NO: 499 - RNA, 50 nt, synthetic construct
  misc_feature 1..50: note = Description of Artificial Sequence: Synthetic oligonucleotide
  source 1..50: mol_type = other RNA
gccaccccaaaaatgaaggggactaaaacattctccttagcctccttcat

SEQ ID NO: 500 - RNA, 50 nt, synthetic construct
  misc_feature 1..50: note = Description of Artificial Sequence: Synthetic oligonucleotide
  source 1..50: mol_type = other RNA
gccaccccaaaaatgaaggggactaaaacatctccttagcctccttcatt

SEQ ID NO: 501 - RNA, 50 nt, synthetic construct
  misc_feature 1..50: note = Description of Artificial Sequence: Synthetic oligonucleotide
  source 1..50: mol_type = other RNA
gccaccccaaaaatgaaggggactaaaacaaacagacacgacaagagcga

SEQ ID NO: 502 - RNA, 50 nt, synthetic construct
  misc_feature 1..50: note = Description of Artificial Sequence: Synthetic oligonucleotide
  source 1..50: mol_type = other RNA
gccaccccaaaaatgaaggggactaaaacatgaacagacacgacaagagc

SEQ ID NO: 503 - RNA, 50 nt, synthetic construct
  misc_feature 1..50: note = Description of Artificial Sequence: Synthetic oligonucleotide
  source 1..50: mol_type = other RNA
gccaccccaaaaatgaaggggactaaaacacacgacaagagcgagaaccc

SEQ ID NO: 504 - RNA, 50 nt, synthetic construct
  misc_feature 1..50: note = Description of Artificial Sequence: Synthetic oligonucleotide
  source 1..50: mol_type = other RNA
gccaccccaaaaatgaaggggactaaaacaactttgtagtagcccgatcg

SEQ ID NO: 505 - RNA, 50 nt, synthetic construct
  misc_feature 1..50: note = Description of Artificial Sequence: Synthetic oligonucleotide
  source 1..50: mol_type = other RNA
gccaccccaaaaatgaaggggactaaaacagtagtagcccgatcgcacca

SEQ ID NO: 506 - RNA, 50 nt, synthetic construct
  misc_feature 1..50: note = Description of Artificial Sequence: Synthetic oligonucleotide
  source 1..50: mol_type = other RNA
gccaccccaaaaatgaaggggactaaaacagcctatgcggccgtggccgt

SEQ ID NO: 507 - RNA, 50 nt, synthetic construct
  misc_feature 1..50: note = Description of Artificial Sequence: Synthetic oligonucleotide
  source 1..50: mol_type = other RNA
gccaccccaaaaatgaaggggactaaaacatctggcaagtctccgccact

SEQ ID NO: 508 - RNA, 50 nt, synthetic construct
  misc_feature 1..50: note = Description of Artificial Sequence: Synthetic oligonucleotide
  source 1..50: mol_type = other RNA
gccaccccaaaaatgaaggggactaaaacataggcatcaacatctggcaa

SEQ ID NO: 509 - RNA, 50 nt, synthetic construct
  misc_feature 1..50: note = Description of Artificial Sequence: Synthetic oligonucleotide
  source 1..50: mol_type = other RNA
gccaccccaaaaatgaaggggactaaaacaacatctggcaagtctccgcc

SEQ ID NO: 510 - RNA, 50 nt, synthetic construct
  misc_feature 1..50: note = Description of Artificial Sequence: Synthetic oligonucleotide
  source 1..50: mol_type = other RNA
gccaccccaaaaatgaaggggactaaaacagagatcctttgcgagcgggg

SEQ ID NO: 511 - RNA, 50 nt, synthetic construct
  misc_feature 1..50: note = Description of Artificial Sequence: Synthetic oligonucleotide
  source 1..50: mol_type = other RNA
gccaccccaaaaatgaaggggactaaaacagatcctttgcgagcggggag

SEQ ID NO: 512 - RNA, 50 nt, synthetic construct
  misc_feature 1..50: note = Description of Artificial Sequence: Synthetic oligonucleotide
  source 1..50: mol_type = other RNA
gccaccccaaaaatgaaggggactaaaacattgcgagcggggagagctcg

SEQ ID NO: 513 - RNA, 50 nt, synthetic construct
  misc_feature 1..50: note = Description of Artificial Sequence: Synthetic oligonucleotide
  source 1..50: mol_type = other RNA
gccaccccaaaaatgaaggggactaaaacaatgatcttgatcttcattgt

SEQ ID NO: 514 - RNA, 50 nt, synthetic construct
  misc_feature 1..50: note = Description of Artificial Sequence: Synthetic oligonucleotide
  source 1..50: mol_type = other RNA
gccaccccaaaaatgaaggggactaaaacaacgccctggtgcctggggcg

SEQ ID NO: 515 - RNA, 50 nt, synthetic construct
  misc_feature 1..50: note = Description of Artificial Sequence: Synthetic oligonucleotide
  source 1..50: mol_type = other RNA
gccaccccaaaaatgaaggggactaaaacagctggcggcgggtgtggacg

SEQ ID NO: 516 - RNA, 50 nt, synthetic construct
  misc_feature 1..50: note = Description of Artificial Sequence: Synthetic oligonucleotide
  source 1..50: mol_type = other RNA
gccaccccaaaaatgaaggggactaaaacaccgagtacatagggtcctgt

SEQ ID NO: 517 - RNA, 50 nt, synthetic construct
  misc_feature 1..50: note = Description of Artificial Sequence: Synthetic oligonucleotide
  source 1..50: mol_type = other RNA
gccaccccaaaaatgaaggggactaaaacacgagtacatagggtcctgtt

SEQ ID NO: 518 - RNA, 50 nt, synthetic construct
  misc_feature 1..50: note = Description of Artificial Sequence: Synthetic oligonucleotide
  source 1..50: mol_type = other RNA
gccaccccaaaaatgaaggggactaaaacaagagggggccgctgtggcgg

SEQ ID NO: 519 - RNA, 50 nt, synthetic construct
  misc_feature 1..50: note = Description of Artificial Sequence: Synthetic oligonucleotide
  source 1..50: mol_type = other RNA
gccaccccaaaaatgaaggggactaaaacattttcgatgagccctcggcg

SEQ ID NO: 520 - RNA, 50 nt, synthetic construct
  misc_feature 1..50: note = Description of Artificial Sequence: Synthetic oligonucleotide
  source 1..50: mol_type = other RNA
gccaccccaaaaatgaaggggactaaaacagcaaggcaggattttcgatg

SEQ ID NO: 521 - RNA, 50 nt, synthetic construct
  misc_feature 1..50: note = Description of Artificial Sequence: Synthetic oligonucleotide
  source 1..50: mol_type = other RNA
gccaccccaaaaatgaaggggactaaaacattcgatgagccctcggcggt

SEQ ID NO: 522 - RNA, 50 nt, synthetic construct
  misc_feature 1..50: note = Description of Artificial Sequence: Synthetic oligonucleotide
  source 1..50: mol_type = other RNA
gccaccccaaaaatgaaggggactaaaacaagcagcgttcaccagcgccg

SEQ ID NO: 523 - RNA, 50 nt, synthetic construct
  misc_feature 1..50: note = Description of Artificial Sequence: Synthetic oligonucleotide
  source 1..50: mol_type = other RNA
gccaccccaaaaatgaaggggactaaaacagcgttcaccagcgccggggt

SEQ ID NO: 524 - RNA, 50 nt, synthetic construct
  misc_feature 1..50: note = Description of Artificial Sequence: Synthetic oligonucleotide
  source 1..50: mol_type = other RNA
gccaccccaaaaatgaaggggactaaaacacgagtaagtcacagcagcgt

SEQ ID NO: 525 - RNA, 50 nt, synthetic construct
  misc_feature 1..50: note = Description of Artificial Sequence: Synthetic oligonucleotide
  source 1..50: mol_type = other RNA
gccaccccaaaaatgaaggggactaaaacagtcttaaggaaaccgacgtg

SEQ ID NO: 526 - RNA, 50 nt, synthetic construct
  misc_feature 1..50: note = Description of Artificial Sequence: Synthetic oligonucleotide
  source 1..50: mol_type = other RNA
gccaccccaaaaatgaaggggactaaaacatcatcataaccattgggttc

SEQ ID NO: 527 - RNA, 50 nt, synthetic construct
  misc_feature 1..50: note = Description of Artificial Sequence: Synthetic oligonucleotide
  source 1..50: mol_type = other RNA
gccaccccaaaaatgaaggggactaaaacagactgctccatttcccgtct

SEQ ID NO: 528 - RNA, 50 nt, synthetic construct
  misc_feature 1..50: note = Description of Artificial Sequence: Synthetic oligonucleotide
  source 1..50: mol_type = other RNA
gccaccccaaaaatgaaggggactaaaacaagacccctgtcccatagcgg

SEQ ID NO: 529 - RNA, 50 nt, synthetic construct
  misc_feature 1..50: note = Description of Artificial Sequence: Synthetic oligonucleotide
  source 1..50: mol_type = other RNA
gccaccccaaaaatgaaggggactaaaacacattctggccaaagacccct

SEQ ID NO: 530 - RNA, 50 nt, synthetic construct
  misc_feature 1..50: note = Description of Artificial Sequence: Synthetic oligonucleotide
  source 1..50: mol_type = other RNA
gccaccccaaaaatgaaggggactaaaacatggccaaagacccctgtccc

SEQ ID NO: 531 - RNA, 50 nt, synthetic construct
  misc_feature 1..50: note = Description of Artificial Sequence: Synthetic oligonucleotide
  source 1..50: mol_type = other RNA
gccaccccaaaaatgaaggggactaaaacataaaaaggcccctgaacgag

SEQ ID NO: 532 - RNA, 50 nt, synthetic construct
  misc_feature 1..50: note = Description of Artificial Sequence: Synthetic oligonucleotide
  source 1..50: mol_type = other RNA
gccaccccaaaaatgaaggggactaaaacagataaaaaggcccctgaacg

SEQ ID NO: 533 - RNA, 50 nt, synthetic construct
  misc_feature 1..50: note = Description of Artificial Sequence: Synthetic oligonucleotide
  source 1..50: mol_type = other RNA
gccaccccaaaaatgaaggggactaaaacaaaaaggcccctgaacgagat

SEQ ID NO: 534 - RNA, 50 nt, synthetic construct
  misc_feature 1..50: note = Description of Artificial Sequence: Synthetic oligonucleotide
  source 1..50: mol_type = other RNA
gccaccccaaaaatgaaggggactaaaacatcgtgctctctttgaaacgc

SEQ ID NO: 535 - RNA, 50 nt, synthetic construct
  misc_feature 1..50: note = Description of Artificial Sequence: Synthetic oligonucleotide
  source 1..50: mol_type = other RNA
gccaccccaaaaatgaaggggactaaaacacactggtactggggccggac

SEQ ID NO: 536 - RNA, 50 nt, synthetic construct
  misc_feature 1..50: note = Description of Artificial Sequence: Synthetic oligonucleotide
  source 1..50: mol_type = other RNA
gccaccccaaaaatgaaggggactaaaacacggagccgctcgtgctctct

SEQ ID NO: 537 - RNA, 50 nt, synthetic construct
  misc_feature 1..50: note = Description of Artificial Sequence: Synthetic oligonucleotide
  source 1..50: mol_type = other RNA
gccaccccaaaaatgaaggggactaaaacaattgcggccccatggatccc

SEQ ID NO: 538 - RNA, 50 nt, synthetic construct
  misc_feature 1..50: note = Description of Artificial Sequence: Synthetic oligonucleotide
  source 1..50: mol_type = other RNA
gccaccccaaaaatgaaggggactaaaacaatctccaagcttcattgcgg

SEQ ID NO: 539 - RNA, 50 nt, synthetic construct
  misc_feature 1..50: note = Description of Artificial Sequence: Synthetic oligonucleotide
  source 1..50: mol_type = other RNA
gccaccccaaaaatgaaggggactaaaacaaagcttcattgcggccccat

SEQ ID NO: 540 - RNA, 50 nt, synthetic construct
  misc_feature 1..50: note = Description of Artificial Sequence: Synthetic oligonucleotide
  source 1..50: mol_type = other RNA
gccaccccaaaaatgaaggggactaaaacagtgccagtgcatcggttcac

SEQ ID NO: 541 - RNA, 50 nt, synthetic construct
  misc_feature 1..50: note = Description of Artificial Sequence: Synthetic oligonucleotide
  source 1..50: mol_type = other RNA
gccaccccaaaaatgaaggggactaaaacatcgggtagtcgccatacccc

SEQ ID NO: 542 - RNA, 50 nt, synthetic construct
  misc_feature 1..50: note = Description of Artificial Sequence: Synthetic oligonucleotide
  source 1..50: mol_type = other RNA
gccaccccaaaaatgaaggggactaaaacacgccataccccatgccatca

SEQ ID NO: 543 - RNA, 50 nt, synthetic construct
  misc_feature 1..50: note = Description of Artificial Sequence: Synthetic oligonucleotide
  source 1..50: mol_type = other RNA
gccaccccaaaaatgaaggggactaaaacaaggttcgacagctcatctgt

SEQ ID NO: 544 - RNA, 50 nt, synthetic construct
  misc_feature 1..50: note = Description of Artificial Sequence: Synthetic oligonucleotide
  source 1..50: mol_type = other RNA
gccaccccaaaaatgaaggggactaaaacattgaggggaggttcgacagc

SEQ ID NO: 545 - RNA, 50 nt, synthetic construct
  misc_feature 1..50: note = Description of Artificial Sequence: Synthetic oligonucleotide
  source 1..50: mol_type = other RNA
gccaccccaaaaatgaaggggactaaaacaggggaggttcgacagctcat

SEQ ID NO: 546 - RNA, 50 nt, synthetic construct
  misc_feature 1..50: note = Description of Artificial Sequence: Synthetic oligonucleotide
  source 1..50: mol_type = other RNA
gccaccccaaaaatgaaggggactaaaacagcggccgagcttgatgagcg

SEQ ID NO: 547 - RNA, 50 nt, synthetic construct
  misc_feature 1..50: note = Description of Artificial Sequence: Synthetic oligonucleotide
  source 1..50: mol_type = other RNA
gccaccccaaaaatgaaggggactaaaacagagtagcggccgagcttgat

SEQ ID NO: 548 - RNA, 50 nt, synthetic construct
  misc_feature 1..50: note = Description of Artificial Sequence: Synthetic oligonucleotide
  source 1..50: mol_type = other RNA
gccaccccaaaaatgaaggggactaaaacaaattgtagcgcgtggctccg

SEQ ID NO: 549 - RNA, 50 nt, synthetic construct
  misc_feature 1..50: note = Description of Artificial Sequence: Synthetic oligonucleotide
  source 1..50: mol_type = other RNA
gccaccccaaaaatgaaggggactaaaacacgatttgaaaccggttgtaa

SEQ ID NO: 550 - RNA, 50 nt, synthetic construct
  misc_feature 1..50: note = Description of Artificial Sequence: Synthetic oligonucleotide
  source 1..50: mol_type = other RNA
gccaccccaaaaatgaaggggactaaaacagaaaccggttgtaagaacgg

SEQ ID NO: 551 - RNA, 50 nt, synthetic construct
  misc_feature 1..50: note = Description of Artificial Sequence: Synthetic oligonucleotide
  source 1..50: mol_type = other RNA
gccaccccaaaaatgaaggggactaaaacagggttctgggtccgcgtgat

SEQ ID NO: 552 - RNA, 50 nt, synthetic construct
  misc_feature 1..50: note = Description of Artificial Sequence: Synthetic oligonucleotide
  source 1..50: mol_type = other RNA
gccaccccaaaaatgaaggggactaaaacatgtcacgttcttcatggccg

SEQ ID NO: 553 - RNA, 50 nt, synthetic construct
  misc_feature 1..50: note = Description of Artificial Sequence: Synthetic oligonucleotide
  source 1..50: mol_type = other RNA
gccaccccaaaaatgaaggggactaaaacacattcagctctgtcacgttc

SEQ ID NO: 554 - RNA, 50 nt, synthetic construct
  misc_feature 1..50: note = Description of Artificial Sequence: Synthetic oligonucleotide
  source 1..50: mol_type = other RNA
gccaccccaaaaatgaaggggactaaaacatctgtcacgttcttcatggc

SEQ ID NO: 555 - RNA, 50 nt, synthetic construct
  misc_feature 1..50: note = Description of Artificial Sequence: Synthetic oligonucleotide
  source 1..50: mol_type = other RNA
gccaccccaaaaatgaaggggactaaaacacactcggggggggtttcggt

SEQ ID NO: 556 - RNA, 50 nt, synthetic construct
  misc_feature 1..50: note = Description of Artificial Sequence: Synthetic oligonucleotide
  source 1..50: mol_type = other RNA
gccaccccaaaaatgaaggggactaaaacactccgacgcacaccacacgc

SEQ ID NO: 557 - RNA, 50 nt, synthetic construct
  misc_feature 1..50: note = Description of Artificial Sequence: Synthetic oligonucleotide
  source 1..50: mol_type = other RNA
gccaccccaaaaatgaaggggactaaaacagtgcgtcgggtctgcgagag

SEQ ID NO: 558 - RNA, 50 nt, synthetic construct
  misc_feature 1..50: note = Description of Artificial Sequence: Synthetic oligonucleotide
  source 1..50: mol_type = other RNA
gccaccccaaaaatgaaggggactaaaacaaacgaagtatgaacataaac

SEQ ID NO: 559 - RNA, 50 nt, synthetic construct
  misc_feature 1..50: note = Description of Artificial Sequence: Synthetic oligonucleotide
  source 1..50: mol_type = other RNA
gccaccccaaaaatgaaggggactaaaacaaaacgaagtatgaacataaa

SEQ ID NO: 560 - RNA, 50 nt, synthetic construct
  misc_feature 1..50: note = Description of Artificial Sequence: Synthetic oligonucleotide
  source 1..50: mol_type = other RNA
gccaccccaaaaatgaaggggactaaaacaaatttttaaatctggcaaag

SEQ ID NO: 561 - RNA, 50 nt, synthetic construct
  misc_feature 1..50: note = Description of Artificial Sequence: Synthetic oligonucleotide
  source 1..50: mol_type = other RNA
gccaccccaaaaatgaaggggactaaaacatagattgagaattaagccac

SEQ ID NO: 562 - RNA, 50 nt, synthetic construct
  misc_feature 1..50: note = Description of Artificial Sequence: Synthetic oligonucleotide
  source 1..50: mol_type = other RNA
gccaccccaaaaatgaaggggactaaaacaagattgagaattaagccact

SEQ ID NO: 563 - RNA, 50 nt, synthetic construct
  misc_feature 1..50: note = Description of Artificial Sequence: Synthetic oligonucleotide
  source 1..50: mol_type = other RNA
gccaccccaaaaatgaaggggactaaaacaatagattgagaattaagcca

SEQ ID NO: 564 - RNA, 50 nt, synthetic construct
  misc_feature 1..50: note = Description of Artificial Sequence: Synthetic oligonucleotide
  source 1..50: mol_type = other RNA
gccaccccaaaaatgaaggggactaaaacatttagccgccgacgctaata

SEQ ID NO: 565 - RNA, 50 nt, synthetic construct
  misc_feature 1..50: note = Description of Artificial Sequence: Synthetic oligonucleotide
  source 1..50: mol_type = other RNA
gccaccccaaaaatgaaggggactaaaacaagtggtatcacgcggatcgc

SEQ ID NO: 566 - RNA, 50 nt, synthetic construct
  misc_feature 1..50: note = Description of Artificial Sequence: Synthetic oligonucleotide
  source 1..50: mol_type = other RNA
gccaccccaaaaatgaaggggactaaaacagacgattttagccgccgacg

SEQ ID NO: 567 - RNA, 50 nt, synthetic construct
  misc_feature 1..50: note = Description of Artificial Sequence: Synthetic oligonucleotide
  source 1..50: mol_type = other RNA
gccaccccaaaaatgaaggggactaaaacacgctgccggttttatcgccc

SEQ ID NO: 568 - RNA, 50 nt, synthetic construct
  misc_feature 1..50: note = Description of Artificial Sequence: Synthetic oligonucleotide
  source 1..50: mol_type = other RNA
gccaccccaaaaatgaaggggactaaaacactgccggttttatcgcccac

SEQ ID NO: 569 - RNA, 50 nt, synthetic construct
  misc_feature 1..50: note = Description of Artificial Sequence: Synthetic oligonucleotide
  source 1..50: mol_type = other RNA
gccaccccaaaaatgaaggggactaaaacatttcagggtctgcgccatcg

SEQ ID NO: 570 - RNA, 50 nt, synthetic construct
  misc_feature 1..50: note = Description of Artificial Sequence: Synthetic oligonucleotide
  source 1..50: mol_type = other RNA
gccaccccaaaaatgaaggggactaaaacacgcgatatcattcgtcgtac

SEQ ID NO: 571 - RNA, 50 nt, synthetic construct
  misc_feature 1..50: note = Description of Artificial Sequence: Synthetic oligonucleotide
  source 1..50: mol_type = other RNA
gccaccccaaaaatgaaggggactaaaacaaaccgcgatatcattcgtcg

SEQ ID NO: 572 - RNA, 50 nt, synthetic construct
  misc_feature 1..50: note = Description of Artificial Sequence: Synthetic oligonucleotide
  source 1..50: mol_type = other RNA
gccaccccaaaaatgaaggggactaaaacaaacgagcggcgcgcgacctt

SEQ ID NO: 573 - RNA, 50 nt, synthetic construct
  misc_feature 1..50: note = Description of Artificial Sequence: Synthetic oligonucleotide
  source 1..50: mol_type = other RNA
gccaccccaaaaatgaaggggactaaaacagcgatgtcattcgtcgtacc

SEQ ID NO: 574 - RNA, 50 nt, synthetic construct
  misc_feature 1..50: note = Description of Artificial Sequence: Synthetic oligonucleotide
  source 1..50: mol_type = other RNA
gccaccccaaaaatgaaggggactaaaacaacggcgatgtcattcgtcgt

SEQ ID NO: 575 - RNA, 50 nt, synthetic construct
  misc_feature 1..50: note = Description of Artificial Sequence: Synthetic oligonucleotide
  source 1..50: mol_type = other RNA
gccaccccaaaaatgaaggggactaaaacagacgattttcgcggcagccg

SEQ ID NO: 576 - RNA, 50 nt, synthetic construct
  misc_feature 1..50: note = Description of Artificial Sequence: Synthetic oligonucleotide
  source 1..50: mol_type = other RNA
gccaccccaaaaatgaaggggactaaaacacagtccacgacgtcggtaag

SEQ ID NO: 577 - RNA, 50 nt, synthetic construct
  misc_feature 1..50: note = Description of Artificial Sequence: Synthetic oligonucleotide
  source 1..50: mol_type = other RNA
gccaccccaaaaatgaaggggactaaaacaccacgacgtcggtaagccgg

SEQ ID NO: 578 - RNA, 50 nt, synthetic construct
  misc_feature 1..50: note = Description of Artificial Sequence: Synthetic oligonucleotide
  source 1..50: mol_type = other RNA
gccaccccaaaaatgaaggggactaaaacagacgtcggtaagccggcccg

SEQ ID NO: 579 - RNA, 50 nt, synthetic construct
  misc_feature 1..50: note = Description of Artificial Sequence: Synthetic oligonucleotide
  source 1..50: mol_type = other RNA
gccaccccaaaaatgaaggggactaaaacatgatgagagactagctcccc

SEQ ID NO: 580 - RNA, 50 nt, synthetic construct
  misc_feature 1..50: note = Description of Artificial Sequence: Synthetic oligonucleotide
  source 1..50: mol_type = other RNA
gccaccccaaaaatgaaggggactaaaacaactcctgcagcttatctcaa

SEQ ID NO: 581 - RNA, 50 nt, synthetic construct
  misc_feature 1..50: note = Description of Artificial Sequence: Synthetic oligonucleotide
  source 1..50: mol_type = other RNA
gccaccccaaaaatgaaggggactaaaacagaatgaactcctgcagctta

SEQ ID NO: 582 - RNA, 50 nt, synthetic construct
  misc_feature 1..50: note = Description of Artificial Sequence: Synthetic oligonucleotide
  source 1..50: mol_type = other RNA
gccaccccaaaaatgaaggggactaaaacagcttgtcgacatcttgtctc

SEQ ID NO: 583 - RNA, 50 nt, synthetic construct
  misc_feature 1..50: note = Description of Artificial Sequence: Synthetic oligonucleotide
  source 1..50: mol_type = other RNA
gccaccccaaaaatgaaggggactaaaacacttctgcgcttgtcgacatc

SEQ ID NO: 584 - RNA, 50 nt, synthetic construct
  misc_feature 1..50: note = Description of Artificial Sequence: Synthetic oligonucleotide
  source 1..50: mol_type = other RNA
gccaccccaaaaatgaaggggactaaaacagtcgacatcttgtctcacaa

SEQ ID NO: 585 - RNA, 50 nt, synthetic construct
  misc_feature 1..50: note = Description of Artificial Sequence: Synthetic oligonucleotide
  source 1..50: mol_type = other RNA
gccaccccaaaaatgaaggggactaaaacacgcccccgtgacccaccgcc

SEQ ID NO: 586 - RNA, 50 nt, synthetic construct
  misc_feature 1..50: note = Description of Artificial Sequence: Synthetic oligonucleotide
  source 1..50: mol_type = other RNA
gccaccccaaaaatgaaggggactaaaacaacgcccccgtgacccaccgc

SEQ ID NO: 587 - RNA, 50 nt, synthetic construct
  misc_feature 1..50: note = Description of Artificial Sequence: Synthetic oligonucleotide
  source 1..50: mol_type = other RNA
gccaccccaaaaatgaaggggactaaaacaggacgcccccgtgacccacc

SEQ ID NO: 588 - RNA, 50 nt, synthetic construct
  misc_feature 1..50: note = Description of Artificial Sequence: Synthetic oligonucleotide
  source 1..50: mol_type = other RNA
gccaccccaaaaatgaaggggactaaaacacgatggttggccttatattg

SEQ ID NO: 589 - RNA, 50 nt, synthetic construct
  misc_feature 1..50: note = Description of Artificial Sequence: Synthetic oligonucleotide
  source 1..50: mol_type = other RNA
gccaccccaaaaatgaaggggactaaaacagtctttctggcgatggttgg

SEQ ID NO: 590 - RNA, 50 nt, synthetic construct
  misc_feature 1..50: note = Description of Artificial Sequence: Synthetic oligonucleotide
  source 1..50: mol_type = other RNA
gccaccccaaaaatgaaggggactaaaacatggcgatggttggccttata

SEQ ID NO: 591 - RNA, 50 nt, synthetic construct
  misc_feature 1..50: note = Description of Artificial Sequence: Synthetic oligonucleotide
  source 1..50: mol_type = other RNA
gccaccccaaaaatgaaggggactaaaacaatcaagaatcgcctaggatc

SEQ ID NO: 592 - RNA, 50 nt, synthetic construct
  misc_feature 1..50: note = Description of Artificial Sequence: Synthetic oligonucleotide
  source 1..50: mol_type = other RNA
gccaccccaaaaatgaaggggactaaaacaaattgatggagcttgcatca

SEQ ID NO: 593 - RNA, 50 nt, synthetic construct
  misc_feature 1..50: note = Description of Artificial Sequence: Synthetic oligonucleotide
  source 1..50: mol_type = other RNA
gccaccccaaaaatgaaggggactaaaacagacaataacctcctggcatg

SEQ ID NO: 594 - RNA, 50 nt, synthetic construct
  misc_feature 1..50: note = Description of Artificial Sequence: Synthetic oligonucleotide
  source 1..50: mol_type = other RNA
gccaccccaaaaatgaaggggactaaaacaaggtcgccgttgaggtcatc

SEQ ID NO: 595 - RNA, 50 nt, synthetic construct
  misc_feature 1..50: note = Description of Artificial Sequence: Synthetic oligonucleotide
  source 1..50: mol_type = other RNA
gccaccccaaaaatgaaggggactaaaacagtcgccgttgaggtcatcgt

SEQ ID NO: 596 - RNA, 50 nt, synthetic construct
  misc_feature 1..50: note = Description of Artificial Sequence: Synthetic oligonucleotide
  source 1..50: mol_type = other RNA
gccaccccaaaaatgaaggggactaaaacatcgccgtcgaggtcgccgtt

SEQ ID NO: 597 - RNA, 50 nt, synthetic construct
  misc_feature 1..50: note = Description of Artificial Sequence: Synthetic oligonucleotide
  source 1..50: mol_type = other RNA
gccaccccaaaaatgaaggggactaaaacagtctatagtcgattcactat

SEQ ID NO: 598 - RNA, 50 nt, synthetic construct
  misc_feature 1..50: note = Description of Artificial Sequence: Synthetic oligonucleotide
  source 1..50: mol_type = other RNA
gccaccccaaaaatgaaggggactaaaacatatagtcgattcactatctg

SEQ ID NO: 599 - RNA, 50 nt, synthetic construct
  misc_feature 1..50: note = Description of Artificial Sequence: Synthetic oligonucleotide
  source 1..50: mol_type = other RNA
gccaccccaaaaatgaaggggactaaaacatatgtctatagtcgattcac

SEQ ID NO: 600 - RNA, 41 nt, synthetic construct
  misc_feature 1..41: note = Description of Artificial Sequence: Synthetic oligonucleotide
  source 1..41: mol_type = other RNA
taatttctactaagtgtagatcgcgcggaatcgcatctacc

SEQ ID NO: 601 - RNA, 41 nt, synthetic construct
  misc_feature 1..41: note = Description of Artificial Sequence: Synthetic oligonucleotide
  source 1..41: mol_type = other RNA
taatttctactaagtgtagattctccgtccgcgccgtttta

SEQ ID NO: 602 - RNA, 41 nt, synthetic construct
  misc_feature 1..41: note = Description of Artificial Sequence: Synthetic oligonucleotide
  source 1..41: mol_type = other RNA
taatttctactaagtgtagatgggcccacgatcgtcgtcct

SEQ ID NO: 603 - RNA, 41 nt, synthetic construct
  misc_feature 1..41: note = Description of Artificial Sequence: Synthetic oligonucleotide
  source 1..41: mol_type = other RNA
taatttctactaagtgtagatgagacgtaacaatgcactac

SEQ ID NO: 604 - RNA, 41 nt, synthetic construct
  misc_feature 1..41: note = Description of Artificial Sequence: Synthetic oligonucleotide
  source 1..41: mol_type = other RNA
taatttctactaagtgtagatggactaggggatgttgataa

SEQ ID NO: 605 - RNA, 41 nt, synthetic construct
  misc_feature 1..41: note = Description of Artificial Sequence: Synthetic oligonucleotide
  source 1..41: mol_type = other RNA
taatttctactaagtgtagattgtgagaccatcgaagagag

SEQ ID NO: 606 - RNA, 41 nt, synthetic construct
  misc_feature 1..41: note = Description of Artificial Sequence: Synthetic oligonucleotide
  source 1..41: mol_type = other RNA
taatttctactaagtgtagattatgcgcaggcgaacgacgt

SEQ ID NO: 607 - RNA, 41 nt, synthetic construct
  misc_feature 1..41: note = Description of Artificial Sequence: Synthetic oligonucleotide
  source 1..41: mol_type = other RNA
taatttctactaagtgtagattggtacgacgaatgacatcg

SEQ ID NO: 608 - RNA, 41 nt, synthetic construct
  misc_feature 1..41: note = Description of Artificial Sequence: Synthetic oligonucleotide
  source 1..41: mol_type = other RNA
taatttctactaagtgtagatattgacaccgccgataacgc

SEQ ID NO: 609 - RNA, 41 nt, synthetic construct
  misc_feature 1..41: note = Description of Artificial Sequence: Synthetic oligonucleotide
  source 1..41: mol_type = other RNA
taatttctactaagtgtagatgcgcggccgcgctacagtac

SEQ ID NO: 610 - RNA, 41 nt, synthetic construct
  misc_feature 1..41: note = Description of Artificial Sequence: Synthetic oligonucleotide
  source 1..41: mol_type = other RNA
taatttctactaagtgtagatgccaaaagatcgtgcgccgc

SEQ ID NO: 611 - RNA, 41 nt, synthetic construct
  misc_feature 1..41: note = Description of Artificial Sequence: Synthetic oligonucleotide
  source 1..41: mol_type = other RNA
taatttctactaagtgtagatcgttggcggcccggctagcg

SEQ ID NO: 612 - RNA, 41 nt, synthetic construct
  misc_feature 1..41: note = Description of Artificial Sequence: Synthetic oligonucleotide
  source 1..41: mol_type = other RNA
  modified_base 41: mod_base = OTHER; note = Thymine
taatttctactaagtgtagatgaacgagcggcgcgcgacct

SEQ ID NO: 613 - RNA, 41 nt, synthetic construct
  misc_feature 1..41: note = Description of Artificial Sequence: Synthetic oligonucleotide
  source 1..41: mol_type = other RNA
taatttctactaagtgtagattggtacgacgaatgatatcg

SEQ ID NO: 614 - RNA, 41 nt, synthetic construct
  misc_feature 1..41: note = Description of Artificial Sequence: Synthetic oligonucleotide
  source 1..41: mol_type = other RNA
  modified_base 24: mod_base = OTHER; note = Thymine
  modified_base 33: mod_base = OTHER; note = Thymine
  modified_base 35: mod_base = OTHER; note = Thymine
  modified_base 38: mod_base = OTHER; note = Thymine
  modified_base 39: mod_base = OTHER; note = Thymine
taatttctactaagtgtagataataaccgcgatatcattcg

SEQ ID NO: 615 - RNA, 41 nt, synthetic construct
  misc_feature 1..41: note = Description of Artificial Sequence: Synthetic oligonucleotide
  source 1..41: mol_type = other RNA
taatttctactaagtgtagatgggccggcttaccgacgtcg

SEQ ID NO: 616 - RNA, 41 nt, synthetic construct
  misc_feature 1..41: note = Description of Artificial Sequence: Synthetic oligonucleotide
  source 1..41: mol_type = other RNA
taatttctactaagtgtagatggcgatgattctcgccgctg

SEQ ID NO: 617 - RNA, 41 nt, synthetic construct
  misc_feature 1..41: note = Description of Artificial Sequence: Synthetic oligonucleotide
  source 1..41: mol_type = other RNA
taatttctactaagtgtagatacgacgtcggtaagccggcc

SEQ ID NO: 618 - RNA, 41 nt, synthetic construct
  misc_feature 1..41: note = Description of Artificial Sequence: Synthetic oligonucleotide
  source 1..41: mol_type = other RNA
taatttctactaagtgtagatccgctgccggttttatcgcc

SEQ ID NO: 619 - RNA, 41 nt, synthetic construct
  misc_feature 1..41: note = Description of Artificial Sequence: Synthetic oligonucleotide
  source 1..41: mol_type = other RNA
taatttctactaagtgtagatgcgatggcgcagaccctgaa

SEQ ID NO: 620 - RNA, 41 nt, synthetic construct
  misc_feature 1..41: note = Description of Artificial Sequence: Synthetic oligonucleotide
  source 1..41: mol_type = other RNA
taatttctactaagtgtagatgcgctaccggtagtattgcc

SEQ ID NO: 621 - RNA, 41 nt, synthetic construct
  misc_feature 1..41: note = Description of Artificial Sequence: Synthetic oligonucleotide
  source 1..41: mol_type = other RNA
taatttctactaagtgtagataaacgaagtatgaacataaa

SEQ ID NO: 622 - RNA, 41 nt, synthetic construct
  misc_feature 1..41: note = Description of Artificial Sequence: Synthetic oligonucleotide
  source 1..41: mol_type = other RNA
taatttctactaagtgtagatcaaacgaagtatgaacataa

SEQ ID NO: 623 - RNA, 41 nt, synthetic construct
  misc_feature 1..41: note = Description of Artificial Sequence: Synthetic oligonucleotide
  source 1..41: mol_type = other RNA
taatttctactaagtgtagatcaatttttaaatctggcaaa

SEQ ID NO: 624 - RNA, 41 nt, synthetic construct
  misc_feature 1..41: note = Description of Artificial Sequence: Synthetic oligonucleotide
  source 1..41: mol_type = other RNA
taatttctactaagtgtagatagaattaagccactctattc

SEQ ID NO: 625 - RNA, 41 nt, synthetic construct
  misc_feature 1..41: note = Description of Artificial Sequence: Synthetic oligonucleotide
  source 1..41: mol_type = other RNA
taatttctactaagtgtagatatagccgcgctccacaaacc

SEQ ID NO: 626 - RNA, 41 nt, synthetic construct
  misc_feature 1..41: note = Description of Artificial Sequence: Synthetic oligonucleotide
  source 1..41: mol_type = other RNA
taatttctactaagtgtagattatagccgcgctccacaaac

SEQ ID NO: 627 - RNA, 50 nt, synthetic construct
  misc_feature 1..50: note = Description of Artificial Sequence: Synthetic oligonucleotide
  source 1..50: mol_type = other RNA
gccaccccaaaaatgaaggggactaaaacacgtattggcgatgtatccgg

SEQ ID NO: 628 - RNA, 50 nt, synthetic construct
  misc_feature 1..50: note = Description of Artificial Sequence: Synthetic oligonucleotide
  source 1..50: mol_type = other RNA
gccaccccaaaaatgaaggggactaaaacagcacttcgattcgggcgtct

SEQ ID NO: 629 - RNA, 50 nt, synthetic construct
  misc_feature 1..50: note = Description of Artificial Sequence: Synthetic oligonucleotide
  source 1..50: mol_type = other RNA
gccaccccaaaaatgaaggggactaaaacacgtctgcgagttgccgtcac

SEQ ID NO: 630 - RNA, 50 nt, synthetic construct
  misc_feature 1..50: note = Description of Artificial Sequence: Synthetic oligonucleotide
  source 1..50: mol_type = other RNA
gccaccccaaaaatgaaggggactaaaacacgtcattgaccgtgttgcgg

SEQ ID NO: 631 - RNA, 50 nt, synthetic construct
  misc_feature 1..50: note = Description of Artificial Sequence: Synthetic oligonucleotide
  source 1..50: mol_type = other RNA
gccaccccaaaaatgaaggggactaaaacattcgcctcgtgttcggcttc

SEQ ID NO: 632 - RNA, 50 nt, synthetic construct
  misc_feature 1..50: note = Description of Artificial Sequence: Synthetic oligonucleotide
  source 1..50: mol_type = other RNA
gccaccccaaaaatgaaggggactaaaacaattgaccgtgttgcggccga

SEQ ID NO: 633 - RNA, 50 nt, synthetic construct
  misc_feature 1..50: note = Description of Artificial Sequence: Synthetic oligonucleotide
  source 1..50: mol_type = other RNA
gccaccccaaaaatgaaggggactaaaacagcttgtacgcccacccatag

SEQ ID NO: 634 - RNA, 50 nt, synthetic construct
  misc_feature 1..50: note = Description of Artificial Sequence: Synthetic oligonucleotide
  source 1..50: mol_type = other RNA
gccaccccaaaaatgaaggggactaaaacacggtgatgcttgtacgccca

SEQ ID NO: 635 - RNA, 50 nt, synthetic construct
  misc_feature 1..50: note = Description of Artificial Sequence: Synthetic oligonucleotide
  source 1..50: mol_type = other RNA
gccaccccaaaaatgaaggggactaaaacactcttcccgacgtccgcgca

SEQ ID NO: 636 - RNA, 50 nt, synthetic construct
  misc_feature 1..50: note = Description of Artificial Sequence: Synthetic oligonucleotide
  source 1..50: mol_type = other RNA
gccaccccaaaaatgaaggggactaaaacacaacacgatccatgaaatct

SEQ ID NO: 637 - RNA, 50 nt, synthetic construct
  misc_feature 1..50: note = Description of Artificial Sequence: Synthetic oligonucleotide
  source 1..50: mol_type = other RNA
gccaccccaaaaatgaaggggactaaaacacttacttcaatacgtccatc

SEQ ID NO: 638 - RNA, 50 nt, synthetic construct
  misc_feature 1..50: note = Description of Artificial Sequence: Synthetic oligonucleotide
  source 1..50: mol_type = other RNA
gccaccccaaaaatgaaggggactaaaacatcttcaacacgatccatgaa

SEQ ID NO: 639 - RNA, 50 nt, synthetic construct
  misc_feature 1..50: note = Description of Artificial Sequence: Synthetic oligonucleotide
  source 1..50: mol_type = other RNA
gccaccccaaaaatgaaggggactaaaacaacggttttctacaacgtcac

SEQ ID NO: 640 - RNA, 50 nt, synthetic construct
  misc_feature 1..50: note = Description of Artificial Sequence: Synthetic oligonucleotide
  source 1..50: mol_type = other RNA
gccaccccaaaaatgaaggggactaaaacaatcgcatcttcaagttttac

SEQ ID NO: 641 - RNA, 50 nt, synthetic construct
  misc_feature 1..50: note = Description of Artificial Sequence: Synthetic oligonucleotide
  source 1..50: mol_type = other RNA
gccaccccaaaaatgaaggggactaaaacagcttcaatcgcatcttcaag

SEQ ID NO: 642 - RNA, 50 nt, synthetic construct
  misc_feature 1..50: note = Description of Artificial Sequence: Synthetic oligonucleotide
  source 1..50: mol_type = other RNA
gccaccccaaaaatgaaggggactaaaacaaatcagcgttgtcttcgctc

SEQ ID NO: 643 - RNA, 50 nt, synthetic construct
  misc_feature 1..50: note = Description of Artificial Sequence: Synthetic oligonucleotide
  source 1..50: mol_type = other RNA
gccaccccaaaaatgaaggggactaaaacagcgttgtcttcgctccaaat

SEQ ID NO: 644 - RNA, 50 nt, synthetic construct
  misc_feature 1..50: note = Description of Artificial Sequence: Synthetic oligonucleotide
  source 1..50: mol_type = other RNA
gccaccccaaaaatgaaggggactaaaacaattgacctgaatcagcgttg

SEQ ID NO: 645 - RNA, 50 nt, synthetic construct
  misc_feature 1..50: note = Description of Artificial Sequence: Synthetic oligonucleotide
  source 1..50: mol_type = other RNA
gccaccccaaaaatgaaggggactaaaacacgagtgaaggttcctcgcgt

SEQ ID NO: 646 - RNA, 50 nt, synthetic construct
  misc_feature 1..50: note = Description of Artificial Sequence: Synthetic oligonucleotide
  source 1..50: mol_type = other RNA
gccaccccaaaaatgaaggggactaaaacatcgcgtgatccttcgggtgg

SEQ ID NO: 647 - RNA, 50 nt, synthetic construct
  misc_feature 1..50: note = Description of Artificial Sequence: Synthetic oligonucleotide
  source 1..50: mol_type = other RNA
gccaccccaaaaatgaaggggactaaaacatgaaggttcctcgcgtgatc

SEQ ID NO: 648 - RNA, 50 nt, synthetic construct
  misc_feature 1..50: note = Description of Artificial Sequence: Synthetic oligonucleotide
  source 1..50: mol_type = other RNA
gccaccccaaaaatgaaggggactaaaacaagttcgaccggcgggacgtc

SEQ ID NO: 649 - RNA, 50 nt, synthetic construct
  misc_feature 1..50: note = Description of Artificial Sequence: Synthetic oligonucleotide
  source 1..50: mol_type = other RNA
gccaccccaaaaatgaaggggactaaaacaggcgggacgtcgccgcagta

SEQ ID NO: 650 - RNA, 50 nt, synthetic construct
  misc_feature 1..50: note = Description of Artificial Sequence: Synthetic oligonucleotide
  source 1..50: mol_type = other RNA
gccaccccaaaaatgaaggggactaaaacaagcctcgagttcgaccggcg

SEQ ID NO: 651 - RNA, 41 nt, synthetic construct
  misc_feature 1..41: note = Description of Artificial Sequence: Synthetic oligonucleotide
  source 1..41: mol_type = other RNA
taatttctactaagtgtagatggaccatccggtgaaccgcg

SEQ ID NO: 652 - RNA, 41 nt, synthetic construct
  misc_feature 1..41: note = Description of Artificial Sequence: Synthetic oligonucleotide
  source 1..41: mol_type = other RNA
taatttctactaagtgtagatctctaccccgagtaccgcgc

SEQ ID NO: 653 - RNA, 41 nt, synthetic construct
  misc_feature 1..41: note = Description of Artificial Sequence: Synthetic oligonucleotide
  source 1..41: mol_type = other RNA
taatttctactaagtgtagattccatatcgaaggcgacccg

SEQ ID NO: 654 - RNA, 41 nt, synthetic construct
  misc_feature 1..41: note = Description of Artificial Sequence: Synthetic oligonucleotide
  source 1..41: mol_type = other RNA
taatttctactaagtgtagatgagcgaccagtcgtggacgg

SEQ ID NO: 655 - RNA, 41 nt, synthetic construct
  misc_feature 1..41: note = Description of Artificial Sequence: Synthetic oligonucleotide
  source 1..41: mol_type = other RNA
taatttctactaagtgtagatgtccgtcgcccggtgcgatc

SEQ ID NO: 656 - RNA, 41 nt, synthetic construct
  misc_feature 1..41: note = Description of Artificial Sequence: Synthetic oligonucleotide
  source 1..41: mol_type = other RNA
taatttctactaagtgtagatggacatcatccgccgctcgg

SEQ ID NO: 657 - RNA, 41 nt, synthetic construct
  misc_feature 1..41: note = Description of Artificial Sequence: Synthetic oligonucleotide
  source 1..41: mol_type = other RNA
taatttctactaagtgtagatccgccggtgggccgtttcaa

SEQ ID NO: 658 - RNA, 41 nt, synthetic construct
  misc_feature 1..41: note = Description of Artificial Sequence: Synthetic oligonucleotide
  source 1..41: mol_type = other RNA
taatttctactaagtgtagatccgaccgccgacgatcgcgc

SEQ ID NO: 659 - RNA, 41 nt, synthetic construct
  misc_feature 1..41: note = Description of Artificial Sequence: Synthetic oligonucleotide
  source 1..41: mol_type = other RNA
taatttctactaagtgtagatccgcgcaccgacccgcatca

SEQ ID NO: 660 - RNA, 41 nt, synthetic construct
  misc_feature 1..41: note = Description of Artificial Sequence: Synthetic oligonucleotide
  source 1..41: mol_type = other RNA
taatttctactaagtgtagatgcacgtatcgttggtgacgt

SEQ ID NO: 661 - RNA, 41 nt, synthetic construct
  misc_feature 1..41: note = Description of Artificial Sequence: Synthetic oligonucleotide
  source 1..41: mol_type = other RNA
taatttctactaagtgtagattgcgatgagtgttatcgttg

SEQ ID NO: 662 - RNA, 41 nt, synthetic construct
  misc_feature 1..41: note = Description of Artificial Sequence: Synthetic oligonucleotide
  source 1..41: mol_type = other RNA
taatttctactaagtgtagatatggtgcatcaggtatcgcg

SEQ ID NO: 663 - RNA, 41 nt, synthetic construct
  misc_feature 1..41: note = Description of Artificial Sequence: Synthetic oligonucleotide
  source 1..41: mol_type = other RNA
taatttctactaagtgtagataagtaacggataacggacgt

SEQ ID NO: 664 - RNA, 41 nt, synthetic construct
  misc_feature 1..41: note = Description of Artificial Sequence: Synthetic oligonucleotide
  source 1..41: mol_type = other RNA
taatttctactaagtgtagatgcggtggcggatacaaagta

SEQ ID NO: 665 - RNA, 41 nt, synthetic construct
  misc_feature 1..41: note = Description of Artificial Sequence: Synthetic oligonucleotide
  source 1..41: mol_type = other RNA
taatttctactaagtgtagattatcactatgagggcggtat

SEQ ID NO: 666 - RNA, 41 nt, synthetic construct
  misc_feature 1..41: note = Description of Artificial Sequence: Synthetic oligonucleotide
  source 1..41: mol_type = other RNA
taatttctactaagtgtagataagcgattgatggtgatacg

SEQ ID NO: 667 - RNA, 41 nt, synthetic construct
  misc_feature 1..41: note = Description of Artificial Sequence: Synthetic oligonucleotide
  source 1..41: mol_type = other RNA
taatttctactaagtgtagattagttcgtcaaggcttggct

SEQ ID NO: 668 - RNA, 41 nt, synthetic construct
  misc_feature 1..41: note = Description of Artificial Sequence: Synthetic oligonucleotide
  source 1..41: mol_type = other RNA
taatttctactaagtgtagataaagggcaatacgcaaagag

SEQ ID NO: 669 - RNA, 41 nt, synthetic construct
  misc_feature 1..41: note = Description of Artificial Sequence: Synthetic oligonucleotide
  source 1..41: mol_type = other RNA
taatttctactaagtgtagataattgcgaagggcgaacgcg

SEQ ID NO: 670 - RNA, 41 nt, synthetic construct
  misc_feature 1..41: note = Description of Artificial Sequence: Synthetic oligonucleotide
  source 1..41: mol_type = other RNA
taatttctactaagtgtagatccgcgagggccccgatggtt

SEQ ID NO: 671 - RNA, 41 nt, synthetic construct
  misc_feature 1..41: note = Description of Artificial Sequence: Synthetic oligonucleotide
  source 1..41: mol_type = other RNA
taatttctactaagtgtagatcatcgacctactacgaccac

SEQ ID NO: 672 - RNA, 41 nt, synthetic construct
  misc_feature 1..41: note = Description of Artificial Sequence: Synthetic oligonucleotide
  source 1..41: mol_type = other RNA
taatttctactaagtgtagattcatcttatcgacgccgagc

SEQ ID NO: 673 - RNA, 41 nt, synthetic construct
  misc_feature 1..41: note = Description of Artificial Sequence: Synthetic oligonucleotide
  source 1..41: mol_type = other RNA
taatttctactaagtgtagattcgcgtgatccttcgaaacg

SEQ ID NO: 674 - RNA, 41 nt, synthetic construct
  misc_feature 1..41: note = Description of Artificial Sequence: Synthetic oligonucleotide
  source 1..41: mol_type = other RNA
taatttctactaagtgtagatgtgccgcaaccatcgacgtc

SEQ ID NO: 675 - RNA, 50 nt, synthetic construct
  misc_feature 1..50: note = Description of Artificial Sequence: Synthetic oligonucleotide
  source 1..50: mol_type = other RNA
gccaccccaaaaatgaaggggactaaaacacccaaacagtcgatgttacc

SEQ ID NO: 676 - RNA, 50 nt, synthetic construct
  misc_feature 1..50: note = Description of Artificial Sequence: Synthetic oligonucleotide
  source 1..50: mol_type = other RNA
gccaccccaaaaatgaaggggactaaaacacgatgttacctacaagttag

SEQ ID NO: 677 - RNA, 50 nt, synthetic construct
  misc_feature 1..50: note = Description of Artificial Sequence: Synthetic oligonucleotide
  source 1..50: mol_type = other RNA
gccaccccaaaaatgaaggggactaaaacatcacataccaaaacgcttga

SEQ ID NO: 678 - RNA, 50 nt, synthetic construct
  misc_feature 1..50: note = Description of Artificial Sequence: Synthetic oligonucleotide
  source 1..50: mol_type = other RNA
gccaccccaaaaatgaaggggactaaaacagtgcacttaagcaccgtaca

SEQ ID NO: 679 - RNA, 50 nt, synthetic construct
  misc_feature 1..50: note = Description of Artificial Sequence: Synthetic oligonucleotide
  source 1..50: mol_type = other RNA
gccaccccaaaaatgaaggggactaaaacaaacagtcgatgttacctaca

SEQ ID NO: 680 - RNA, 50 nt, synthetic construct
  misc_feature 1..50: note = Description of Artificial Sequence: Synthetic oligonucleotide
  source 1..50: mol_type = other RNA
gccaccccaaaaatgaaggggactaaaacaagtcgatgttacctacaagt

SEQ ID NO: 681 - RNA, 50 nt, synthetic construct
  misc_feature 1..50: note = Description of Artificial Sequence: Synthetic oligonucleotide
  source 1..50: mol_type = other RNA
gccaccccaaaaatgaaggggactaaaacagcaccgtacagcttcaatct

SEQ ID NO: 682 - RNA, 50 nt, synthetic construct
  misc_feature 1..50: note = Description of Artificial Sequence: Synthetic oligonucleotide
  source 1..50: mol_type = other RNA
gccaccccaaaaatgaaggggactaaaacatgcacttaagcaccgtacag

SEQ ID NO: 683 - RNA, 50 nt, synthetic construct
  misc_feature 1..50: note = Description of Artificial Sequence: Synthetic oligonucleotide
  source 1..50: mol_type = other RNA
gccaccccaaaaatgaaggggactaaaacattaagcaccgtacagcttca

SEQ ID NO: 684 - RNA, 50 nt, synthetic construct
  misc_feature 1..50: note = Description of Artificial Sequence: Synthetic oligonucleotide
  source 1..50: mol_type = other RNA
gccaccccaaaaatgaaggggactaaaacaaaacagtcgatgttacctac

SEQ ID NO: 685 - RNA, 50 nt, synthetic construct
  misc_feature 1..50: note = Description of Artificial Sequence: Synthetic oligonucleotide
  source 1..50: mol_type = other RNA
gccaccccaaaaatgaaggggactaaaacattcacataccaaaacgcttg

SEQ ID NO: 686 - RNA, 50 nt, synthetic construct
  misc_feature 1..50: note = Description of Artificial Sequence: Synthetic oligonucleotide
  source 1..50: mol_type = other RNA
gccaccccaaaaatgaaggggactaaaacaacaaccccaaacagtcgatg

SEQ ID NO: 687 - RNA, 50 nt, synthetic construct
  misc_feature 1..50: note = Description of Artificial Sequence: Synthetic oligonucleotide
  source 1..50: mol_type = other RNA
gccaccccaaaaatgaaggggactaaaacacgtgcgattcttcatcgcta

SEQ ID NO: 688 - RNA, 50 nt, synthetic construct
  misc_feature 1..50: note = Description of Artificial Sequence: Synthetic oligonucleotide
  source 1..50: mol_type = other RNA
gccaccccaaaaatgaaggggactaaaacatgtccgtgcgattcttcatc

SEQ ID NO: 689 - RNA, 50 nt, synthetic construct
  misc_feature 1..50: note = Description of Artificial Sequence: Synthetic oligonucleotide
  source 1..50: mol_type = other RNA
gccaccccaaaaatgaaggggactaaaacagattcttcatcgctactatc

SEQ ID NO: 690 - RNA, 50 nt, synthetic construct
  misc_feature 1..50: note = Description of Artificial Sequence: Synthetic oligonucleotide
  source 1..50: mol_type = other RNA
gccaccccaaaaatgaaggggactaaaacaagtgttgtccgtgcgattct

SEQ ID NO: 691 - RNA, 50 nt, synthetic construct
  misc_feature 1..50: note = Description of Artificial Sequence: Synthetic oligonucleotide
  source 1..50: mol_type = other RNA
gccaccccaaaaatgaaggggactaaaacatacaagtgagtgttgtccgt

SEQ ID NO: 692 - RNA, 50 nt, synthetic construct
  misc_feature 1..50: note = Description of Artificial Sequence: Synthetic oligonucleotide
  source 1..50: mol_type = other RNA
gccaccccaaaaatgaaggggactaaaacagtccgtgcgattcttcatcg

SEQ ID NO: 693 - RNA, 50 nt, synthetic construct
  misc_feature 1..50: note = Description of Artificial Sequence: Synthetic oligonucleotide
  source 1..50: mol_type = other RNA
gccaccccaaaaatgaaggggactaaaacactacaagtgagtgttgtccg

SEQ ID NO: 694 - RNA, 50 nt, synthetic construct
  misc_feature 1..50: note = Description of Artificial Sequence: Synthetic oligonucleotide
  source 1..50: mol_type = other RNA
gccaccccaaaaatgaaggggactaaaacagtcgtcaacacctacaagtg

SEQ ID NO: 695 - RNA, 50 nt, synthetic construct
  misc_feature 1..50: note = Description of Artificial Sequence: Synthetic oligonucleotide
  source 1..50: mol_type = other RNA
gccaccccaaaaatgaaggggactaaaacaaagtgagtgttgtccgtgcg

SEQ ID NO: 696 - RNA, 50 nt, synthetic construct
  misc_feature 1..50: note = Description of Artificial Sequence: Synthetic oligonucleotide
  source 1..50: mol_type = other RNA
gccaccccaaaaatgaaggggactaaaacatgcgattcttcatcgctact

SEQ ID NO: 697 - RNA, 50 nt, synthetic construct
  misc_feature 1..50: note = Description of Artificial Sequence: Synthetic oligonucleotide
  source 1..50: mol_type = other RNA
gccaccccaaaaatgaaggggactaaaacattgtccgtgcgattcttcat

SEQ ID NO: 698 - RNA, 50 nt, synthetic construct
  misc_feature 1..50: note = Description of Artificial Sequence: Synthetic oligonucleotide
  source 1..50: mol_type = other RNA
gccaccccaaaaatgaaggggactaaaacacgacgttacctacaagttag

SEQ ID NO: 699 - RNA, 50 nt, synthetic construct
  misc_feature 1..50: note = Description of Artificial Sequence: Synthetic oligonucleotide
  source 1..50: mol_type = other RNA
gccaccccaaaaatgaaggggactaaaacaaccccaaacagtcgacgtta

SEQ ID NO: 700 - RNA, 50 nt, synthetic construct
  misc_feature 1..50: note = Description of Artificial Sequence: Synthetic oligonucleotide
  source 1..50: mol_type = other RNA
gccaccccaaaaatgaaggggactaaaacacaaacagtcgacgttaccta

SEQ ID NO: 701 - RNA, 50 nt, synthetic construct
  misc_feature 1..50: note = Description of Artificial Sequence: Synthetic oligonucleotide
  source 1..50: mol_type = other RNA
gccaccccaaaaatgaaggggactaaaacagacgttacctacaagttagt

SEQ ID NO: 702 - RNA, 50 nt, synthetic construct
  misc_feature 1..50: note = Description of Artificial Sequence: Synthetic oligonucleotide
  source 1..50: mol_type = other RNA
gccaccccaaaaatgaaggggactaaaacacagtcgacgttacctacaag

SEQ ID NO: 703 - RNA, 50 nt, synthetic construct
  misc_feature 1..50: note = Description of Artificial Sequence: Synthetic oligonucleotide
  source 1..50: mol_type = other RNA
gccaccccaaaaatgaaggggactaaaacatataccaaaacgcttgattc

SEQ ID NO: 704 - RNA, 50 nt, synthetic construct
  misc_feature 1..50: note = Description of Artificial Sequence: Synthetic oligonucleotide
  source 1..50: mol_type = other RNA
gccaccccaaaaatgaaggggactaaaacacagtcgttattacctacaag

SEQ ID NO: 705 - RNA, 50 nt, synthetic construct
  misc_feature 1..50: note = Description of Artificial Sequence: Synthetic oligonucleotide
  source 1..50: mol_type = other RNA
gccaccccaaaaatgaaggggactaaaacacccaacagtcgttattacct

SEQ ID NO: 706 - RNA, 50 nt, synthetic construct
  misc_feature 1..50: note = Description of Artificial Sequence: Synthetic oligonucleotide
  source 1..50: mol_type = other RNA
gccaccccaaaaatgaaggggactaaaacacaatctcttacagtttgaag

SEQ ID NO: 707 - RNA, 50 nt, synthetic construct
  misc_feature 1..50: note = Description of Artificial Sequence: Synthetic oligonucleotide
  source 1..50: mol_type = other RNA
gccaccccaaaaatgaaggggactaaaacaacggcttgggtggcgtaatt

SEQ ID NO: 708 - RNA, 50 nt, synthetic construct
  misc_feature 1..50: note = Description of Artificial Sequence: Synthetic oligonucleotide
  source 1..50: mol_type = other RNA
gccaccccaaaaatgaaggggactaaaacagtaatttacgcaacgctttt

SEQ ID NO: 709 - RNA, 50 nt, synthetic construct
  misc_feature 1..50: note = Description of Artificial Sequence: Synthetic oligonucleotide
  source 1..50: mol_type = other RNA
gccaccccaaaaatgaaggggactaaaacagcaacgcttttgcttcaatc

SEQ ID NO: 710 - RNA, 50 nt, synthetic construct
  misc_feature 1..50: note = Description of Artificial Sequence: Synthetic oligonucleotide
  source 1..50: mol_type = other RNA
gccaccccaaaaatgaaggggactaaaacacttcaccccagtcatgaatc

SEQ ID NO: 711 - RNA, 50 nt, synthetic construct
  misc_feature 1..50: note = Description of Artificial Sequence: Synthetic oligonucleotide
  source 1..50: mol_type = other RNA
gccaccccaaaaatgaaggggactaaaacaagtcatgaatcacaaagtgg

SEQ ID NO: 712 - RNA, 50 nt, synthetic construct
  misc_feature 1..50: note = Description of Artificial Sequence: Synthetic oligonucleotide
  source 1..50: mol_type = other RNA
gccaccccaaaaatgaaggggactaaaacacgacttcaccccagtcatga

SEQ ID NO: 713 - RNA, 50 nt, synthetic construct
  misc_feature 1..50: note = Description of Artificial Sequence: Synthetic oligonucleotide
  source 1..50: mol_type = other RNA
gccaccccaaaaatgaaggggactaaaacatatccgcatttaaagcattc

SEQ ID NO: 714 - RNA, 50 nt, synthetic construct
  misc_feature 1..50: note = Description of Artificial Sequence: Synthetic oligonucleotide
  source 1..50: mol_type = other RNA
gccaccccaaaaatgaaggggactaaaacataaagcattctcttcaatga

SEQ ID NO: 715 - RNA, 50 nt, synthetic construct
  misc_feature 1..50: note = Description of Artificial Sequence: Synthetic oligonucleotide
  source 1..50: mol_type = other RNA
gccaccccaaaaatgaaggggactaaaacaagcaagagaacatacgatct

SEQ ID NO: 716 - RNA, 50 nt, synthetic construct
  misc_feature 1..50: note = Description of Artificial Sequence: Synthetic oligonucleotide
  source 1..50: mol_type = other RNA
gccaccccaaaaatgaaggggactaaaacactaccttgttacgacttcac

SEQ ID NO: 717 - RNA, 50 nt, synthetic construct
  misc_feature 1..50: note = Description of Artificial Sequence: Synthetic oligonucleotide
  source 1..50: mol_type = other RNA
gccaccccaaaaatgaaggggactaaaacacctacggctaccttgttacg

SEQ ID NO: 718 - RNA, 50 nt, synthetic construct
  misc_feature 1..50: note = Description of Artificial Sequence: Synthetic oligonucleotide
  source 1..50: mol_type = other RNA
gccaccccaaaaatgaaggggactaaaacaaggttcccctacggctacct

SEQ ID NO: 719 - RNA, 50 nt, synthetic construct
  misc_feature 1..50: note = Description of Artificial Sequence: Synthetic oligonucleotide
  source 1..50: mol_type = other RNA
gccaccccaaaaatgaaggggactaaaacaccgttggtactagtatcccc

SEQ ID NO: 720 - RNA, 50 nt, synthetic construct
  misc_feature 1..50: note = Description of Artificial Sequence: Synthetic oligonucleotide
  source 1..50: mol_type = other RNA
gccaccccaaaaatgaaggggactaaaacatgatcccgttggtactagta

SEQ ID NO: 721 - RNA, 50 nt, synthetic construct
  misc_feature 1..50: note = Description of Artificial Sequence: Synthetic oligonucleotide
  source 1..50: mol_type = other RNA
gccaccccaaaaatgaaggggactaaaacagggattacttatatataacg

SEQ ID NO: 722 - RNA, 50 nt, synthetic construct
  misc_feature 1..50: note = Description of Artificial Sequence: Synthetic oligonucleotide
  source 1..50: mol_type = other RNA
gccaccccaaaaatgaaggggactaaaacaccactccatatacaatccga

SEQ ID NO: 723 - RNA, 50 nt, synthetic construct
  misc_feature 1..50: note = Description of Artificial Sequence: Synthetic oligonucleotide
  source 1..50: mol_type = other RNA
gccaccccaaaaatgaaggggactaaaacatcgattaatggctcagctgc

SEQ ID NO: 724 - RNA, 50 nt, synthetic construct
  misc_feature 1..50: note = Description of Artificial Sequence: Synthetic oligonucleotide
  source 1..50: mol_type = other RNA
gccaccccaaaaatgaaggggactaaaacaaatcatatcgattaatggct

SEQ ID NO: 725 - RNA, 50 nt, synthetic construct
  misc_feature 1..50: note = Description of Artificial Sequence: Synthetic oligonucleotide
  source 1..50: mol_type = other RNA
gccaccccaaaaatgaaggggactaaaacatagtaccggtaagctgcatg

SEQ ID NO: 726 - RNA, 50 nt, synthetic construct
  misc_feature 1..50: note = Description of Artificial Sequence: Synthetic oligonucleotide
  source 1..50: mol_type = other RNA
gccaccccaaaaatgaaggggactaaaacataagctgcatgcgttgccgc

SEQ ID NO: 727 - RNA, 50 nt, synthetic construct
  misc_feature 1..50: note = Description of Artificial Sequence: Synthetic oligonucleotide
  source 1..50: mol_type = other RNA
gccaccccaaaaatgaaggggactaaaacagggaatactcgttttcaggt

SEQ ID NO: 728 - RNA, 50 nt, synthetic construct
  misc_feature 1..50: note = Description of Artificial Sequence: Synthetic oligonucleotide
  source 1..50: mol_type = other RNA
gccaccccaaaaatgaaggggactaaaacacttacgcgcaacgatatgga

SEQ ID NO: 729 - RNA, 50 nt, synthetic construct
  misc_feature 1..50: note = Description of Artificial Sequence: Synthetic oligonucleotide
  source 1..50: mol_type = other RNA
gccaccccaaaaatgaaggggactaaaacaatcgtttccgggtaaagcgt

SEQ ID NO: 730 - RNA, 50 nt, synthetic construct
  misc_feature 1..50: note = Description of Artificial Sequence: Synthetic oligonucleotide
  source 1..50: mol_type = other RNA
gccaccccaaaaatgaaggggactaaaacattgcatccttacgcgcaacg

SEQ ID NO: 731 - RNA, 50 nt, synthetic construct
  misc_feature 1..50: note = Description of Artificial Sequence: Synthetic oligonucleotide
  source 1..50: mol_type = other RNA
gccaccccaaaaatgaaggggactaaaacaagtagggcagtagggcagta

SEQ ID NO: 732 - RNA, 50 nt, synthetic construct
  misc_feature 1..50: note = Description of Artificial Sequence: Synthetic oligonucleotide
  source 1..50: mol_type = other RNA
gccaccccaaaaatgaaggggactaaaacatcgcacttttggctcgaaaa

SEQ ID NO: 733 - RNA, 50 nt, synthetic construct
  misc_feature 1..50: note = Description of Artificial Sequence: Synthetic oligonucleotide
  source 1..50: mol_type = other RNA
gccaccccaaaaatgaaggggactaaaacagggcagtagggcagtagggc

SEQ ID NO: 734 - RNA, 50 nt, synthetic construct
  misc_feature 1..50: note = Description of Artificial Sequence: Synthetic oligonucleotide
  source 1..50: mol_type = other RNA
gccaccccaaaaatgaaggggactaaaacaatttatccgcggtgttaatc

SEQ ID NO: 735 - RNA, 50 nt, synthetic construct
  misc_feature 1..50: note = Description of Artificial Sequence: Synthetic oligonucleotide
  source 1..50: mol_type = other RNA
gccaccccaaaaatgaaggggactaaaacagatttatccgcggtgttaat

SEQ ID NO: 736 - RNA, 50 nt, synthetic construct
  misc_feature 1..50: note = Description of Artificial Sequence: Synthetic oligonucleotide
  source 1..50: mol_type = other RNA
gccaccccaaaaatgaaggggactaaaacattatccgcggtgttaatccc

SEQ ID NO: 737 - RNA, 50 nt, synthetic construct
  misc_feature 1..50: note = Description of Artificial Sequence: Synthetic oligonucleotide
  source 1..50: mol_type = other RNA
gccaccccaaaaatgaaggggactaaaacaacggctaccattgttacgac

SEQ ID NO: 738 - RNA, 50 nt, synthetic construct
  misc_feature 1..50: note = Description of Artificial Sequence: Synthetic oligonucleotide
  source 1..50: mol_type = other RNA
gccaccccaaaaatgaaggggactaaaacaccgcaggttccctacggcta

SEQ ID NO: 739 - RNA, 50 nt, synthetic construct
  misc_feature 1..50: note = Description of Artificial Sequence: Synthetic oligonucleotide
  source 1..50: mol_type = other RNA
gccaccccaaaaatgaaggggactaaaacaggttccctacggctaccatt

SEQ ID NO: 740 - RNA, 50 nt, synthetic construct
  misc_feature 1..50: note = Description of Artificial Sequence: Synthetic oligonucleotide
  source 1..50: mol_type = other RNA
gccaccccaaaaatgaaggggactaaaacaccagtcgctaattttaccgt

SEQ ID NO: 741 - RNA, 50 nt, synthetic construct
  misc_feature 1..50: note = Description of Artificial Sequence: Synthetic oligonucleotide
  source 1..50: mol_type = other RNA
gccaccccaaaaatgaaggggactaaaacaattttaccgtggttggctgc

SEQ ID NO: 742 - RNA, 50 nt, synthetic construct
  misc_feature 1..50: note = Description of Artificial Sequence: Synthetic oligonucleotide
  source 1..50: mol_type = other RNA
gccaccccaaaaatgaaggggactaaaacactaactcccatggcgtgacg

SEQ ID NO: 743 - RNA, 50 nt, synthetic construct
  misc_feature 1..50: note = Description of Artificial Sequence: Synthetic oligonucleotide
  source 1..50: mol_type = other RNA
gccaccccaaaaatgaaggggactaaaacacaatcgagctattagtatcg

SEQ ID NO: 744 - RNA, 50 nt, synthetic construct
  misc_feature 1..50: note = Description of Artificial Sequence: Synthetic oligonucleotide
  source 1..50: mol_type = other RNA
gccaccccaaaaatgaaggggactaaaacaagtatcggttagctacacac

SEQ ID NO: 745 - RNA, 50 nt, synthetic construct
  misc_feature 1..50: note = Description of Artificial Sequence: Synthetic oligonucleotide
  source 1..50: mol_type = other RNA
gccaccccaaaaatgaaggggactaaaacattccacggctctaatgggga

SEQ ID NO: 746 - RNA, 50 nt, synthetic construct
  misc_feature 1..50: note = Description of Artificial Sequence: Synthetic oligonucleotide
  source 1..50: mol_type = other RNA
gccaccccaaaaatgaaggggactaaaacaaggttgacggcatgcattac

SEQ ID NO: 747 - RNA, 50 nt, synthetic construct
  misc_feature 1..50: note = Description of Artificial Sequence: Synthetic oligonucleotide
  source 1..50: mol_type = other RNA
gccaccccaaaaatgaaggggactaaaacagacggcatgcattaccatat

SEQ ID NO: 748 - RNA, 50 nt, synthetic construct
  misc_feature 1..50: note = Description of Artificial Sequence: Synthetic oligonucleotide
  source 1..50: mol_type = other RNA
gccaccccaaaaatgaaggggactaaaacaccatcaggttgacggcatgc

SEQ ID NO: 749 - RNA, 50 nt, synthetic construct
  misc_feature 1..50: note = Description of Artificial Sequence: Synthetic oligonucleotide
  source 1..50: mol_type = other RNA
gccaccccaaaaatgaaggggactaaaacaggaccgttacaggcttgtaa

SEQ ID NO: 750 - RNA, 50 nt, synthetic construct
  misc_feature 1..50: note = Description of Artificial Sequence: Synthetic oligonucleotide
  source 1..50: mol_type = other RNA
gccaccccaaaaatgaaggggactaaaacagttgcaagagctataatcat

SEQ ID NO: 751 - RNA, 50 nt, synthetic construct
  misc_feature 1..50: note = Description of Artificial Sequence: Synthetic oligonucleotide
  source 1..50: mol_type = other RNA
gccaccccaaaaatgaaggggactaaaacaggcttgtaacatagaagttg

SEQ ID NO: 752 - RNA, 50 nt, synthetic construct
  misc_feature 1..50: note = Description of Artificial Sequence: Synthetic oligonucleotide
  source 1..50: mol_type = other RNA
gccaccccaaaaatgaaggggactaaaacatggttagatacggttacggt

SEQ ID NO: 753 - RNA, 50 nt, synthetic construct
  misc_feature 1..50: note = Description of Artificial Sequence: Synthetic oligonucleotide
  source 1..50: mol_type = other RNA
gccaccccaaaaatgaaggggactaaaacaacggttacggttacagcatc

SEQ ID NO: 754 - RNA, 50 nt, synthetic construct
  misc_feature 1..50: note = Description of Artificial Sequence: Synthetic oligonucleotide
  source 1..50: mol_type = other RNA
gccaccccaaaaatgaaggggactaaaacaggagggcataatagccctcc

SEQ ID NO: 755 - RNA, 50 nt, synthetic construct
  misc_feature 1..50: note = Description of Artificial Sequence: Synthetic oligonucleotide
  source 1..50: mol_type = other RNA
gccaccccaaaaatgaaggggactaaaacataccagacgtgtcatctagc

SEQ ID NO: 756 - RNA, 50 nt, synthetic construct
  misc_feature 1..50: note = Description of Artificial Sequence: Synthetic oligonucleotide
  source 1..50: mol_type = other RNA
gccaccccaaaaatgaaggggactaaaacagacgttgcatcactgaatca

SEQ ID NO: 757 - RNA, 50 nt, synthetic construct
  misc_feature 1..50: note = Description of Artificial Sequence: Synthetic oligonucleotide
  source 1..50: mol_type = other RNA
gccaccccaaaaatgaaggggactaaaacaacgtgtcatctagcagacgt

SEQ ID NO: 758 - RNA, 50 nt, synthetic construct
  misc_feature 1..50: note = Description of Artificial Sequence: Synthetic oligonucleotide
  source 1..50: mol_type = other RNA
gccaccccaaaaatgaaggggactaaaacagacccgccgtcacagtataa

SEQ ID NO: 759 - RNA, 50 nt, synthetic construct
  misc_feature 1..50: note = Description of Artificial Sequence: Synthetic oligonucleotide
  source 1..50: mol_type = other RNA
gccaccccaaaaatgaaggggactaaaacagatattgcagacccgccgtc

SEQ ID NO: 760 - RNA, 50 nt, synthetic construct
  misc_feature 1..50: note = Description of Artificial Sequence: Synthetic oligonucleotide
  source 1..50: mol_type = other RNA
gccaccccaaaaatgaaggggactaaaacaatctccgccaatagagacag

SEQ ID NO: 761 - RNA, 41 nt, synthetic construct
  misc_feature 1..41: note = Description of Artificial Sequence: Synthetic oligonucleotide
  source 1..41: mol_type = other RNA
taatttctactaagtgtagatataagcgtggggtcacaagt

SEQ ID NO: 762 - RNA, 41 nt, synthetic construct
  misc_feature 1..41: note = Description of Artificial Sequence: Synthetic oligonucleotide
  source 1..41: mol_type = other RNA
taatttctactaagtgtagatgtcagacccaccatgacttt

SEQ ID NO: 763 - RNA, 41 nt, synthetic construct
  misc_feature 1..41: note = Description of Artificial Sequence: Synthetic oligonucleotide
  source 1..41: mol_type = other RNA
taatttctactaagtgtagatactgaatcaagcgttttggt

SEQ ID NO: 764 - RNA, 41 nt, synthetic construct
  misc_feature 1..41: note = Description of Artificial Sequence: Synthetic oligonucleotide
  source 1..41: mol_type = other RNA
taatttctactaagtgtagatcgaggttgtcgataacgcaa

SEQ ID NO: 765 - RNA, 41 nt, synthetic construct
  misc_feature 1..41: note = Description of Artificial Sequence: Synthetic oligonucleotide
  source 1..41: mol_type = other RNA
taatttctactaagtgtagatatcgcgctggccaagtgcat

SEQ ID NO: 766 - RNA, 41 nt, synthetic construct
  misc_feature 1..41: note = Description of Artificial Sequence: Synthetic oligonucleotide
  source 1..41: mol_type = other RNA
taatttctactaagtgtagatcagttgtaaatgcgctttca

SEQ ID NO: 767 - RNA, 41 nt, synthetic construct
  misc_feature 1..41: note = Description of Artificial Sequence: Synthetic oligonucleotide
  source 1..41: mol_type = other RNA
taatttctactaagtgtagatgctactgatcttagcggcgg

SEQ ID NO: 768 - RNA, 41 nt, synthetic construct
  misc_feature 1..41: note = Description of Artificial Sequence: Synthetic oligonucleotide
  source 1..41: mol_type = other RNA
taatttctactaagtgtagatatacctagagatagtggacg

SEQ ID NO: 769 - RNA, 41 nt, synthetic construct
  misc_feature 1..41: note = Description of Artificial Sequence: Synthetic oligonucleotide
  source 1..41: mol_type = other RNA
taatttctactaagtgtagattagttaatacctagagatag

SEQ ID NO: 770 - RNA, 41 nt, synthetic construct
  misc_feature 1..41: note = Description of Artificial Sequence: Synthetic oligonucleotide
  source 1..41: mol_type = other RNA
taatttctactaagtgtagatgctacttccgctgataatca

SEQ ID NO: 771 - RNA, 41 nt, synthetic construct
  misc_feature 1..41: note = Description of Artificial Sequence: Synthetic oligonucleotide
  source 1..41: mol_type = other RNA
taatttctactaagtgtagattcaagcacccatggtggtta

SEQ ID NO: 772 - RNA, 41 nt, synthetic construct
  misc_feature 1..41: note = Description of Artificial Sequence: Synthetic oligonucleotide
  source 1..41: mol_type = other RNA
taatttctactaagtgtagatcaagttgtactggaccgatt

SEQ ID NO: 773 - RNA, 41 nt, synthetic construct
  misc_feature 1..41: note = Description of Artificial Sequence: Synthetic oligonucleotide
  source 1..41: mol_type = other RNA
taatttctactaagtgtagatacgactctacttaagtcgaa

SEQ ID NO: 774 - RNA, 41 nt, synthetic construct
  misc_feature 1..41: note = Description of Artificial Sequence: Synthetic oligonucleotide
  source 1..41: mol_type = other RNA
taatttctactaagtgtagatctgacgaggagcaaccgatt

SEQ ID NO: 775 - RNA, 41 nt, synthetic construct
  misc_feature 1..41: note = Description of Artificial Sequence: Synthetic oligonucleotide
  source 1..41: mol_type = other RNA
taatttctactaagtgtagatgtacatctgcgcgaatgata

SEQ ID NO: 776 - RNA, 41 nt, synthetic construct
  misc_feature 1..41: note = Description of Artificial Sequence: Synthetic oligonucleotide
  source 1..41: mol_type = other RNA
taatttctactaagtgtagatgggttattattgtatgctgt

SEQ ID NO: 777 - RNA, 41 nt, synthetic construct
  misc_feature 1..41: note = Description of Artificial Sequence: Synthetic oligonucleotide
  source 1..41: mol_type = other RNA
taatttctactaagtgtagatgaagcttgtatcatggcact

SEQ ID NO: 778 - RNA, 41 nt, synthetic construct
  misc_feature 1..41: note = Description of Artificial Sequence: Synthetic oligonucleotide
  source 1..41: mol_type = other RNA
taatttctactaagtgtagatagcctgccattgtaatctta

SEQ ID NO: 779 - RNA, 41 nt, synthetic construct
  misc_feature 1..41: note = Description of Artificial Sequence: Synthetic oligonucleotide
  source 1..41: mol_type = other RNA
taatttctactaagtgtagattaaagccataaaaaactaca

SEQ ID NO: 780 - RNA, 41 nt, synthetic construct
  misc_feature 1..41: note = Description of Artificial Sequence: Synthetic oligonucleotide
  source 1..41: mol_type = other RNA
taatttctactaagtgtagataatcatgtagaatacttgag

SEQ ID NO: 781 - RNA, 41 nt, synthetic construct
  misc_feature 1..41: note = Description of Artificial Sequence: Synthetic oligonucleotide
  source 1..41: mol_type = other RNA
taatttctactaagtgtagatgtgaacctgaatgccctaat

SEQ ID NO: 782 - RNA, 41 nt, synthetic construct
  misc_feature 1..41: note = Description of Artificial Sequence: Synthetic oligonucleotide
  source 1..41: mol_type = other RNA
taatttctactaagtgtagatgtacgcttactcttggcggc

SEQ ID NO: 783 - RNA, 41 nt, synthetic construct
  misc_feature 1..41: note = Description of Artificial Sequence: Synthetic oligonucleotide
  source 1..41: mol_type = other RNA
taatttctactaagtgtagatgttccgttatcgccattgca

SEQ ID NO: 784 - RNA, 41 nt, synthetic construct
  misc_feature 1..41: note = Description of Artificial Sequence: Synthetic oligonucleotide
  source 1..41: mol_type = other RNA
taatttctactaagtgtagattacagatgccgcgggtgatc

SEQ ID NO: 785 - RNA, 41 nt, synthetic construct
  misc_feature 1..41: note = Description of Artificial Sequence: Synthetic oligonucleotide
  source 1..41: mol_type = other RNA
taatttctactaagtgtagataattgctcaagaaaatccta

SEQ ID NO: 786 - RNA, 41 nt, synthetic construct
  misc_feature 1..41: note = Description of Artificial Sequence: Synthetic oligonucleotide
  source 1..41: mol_type = other RNA
taatttctactaagtgtagataatacacaatgggaattgcg

SEQ ID NO: 787 - RNA, 41 nt, synthetic construct
  misc_feature 1..41: note = Description of Artificial Sequence: Synthetic oligonucleotide
  source 1..41: mol_type = other RNA
taatttctactaagtgtagatttgccaatagagtaattact

SEQ ID NO: 788 - RNA, 41 nt, synthetic construct
  misc_feature 1..41: note = Description of Artificial Sequence: Synthetic oligonucleotide
  source 1..41: mol_type = other RNA
taatttctactaagtgtagattaactattctgtccgggagt

SEQ ID NO: 789 - RNA, 41 nt, synthetic construct
  misc_feature 1..41: note = Description of Artificial Sequence: Synthetic oligonucleotide
  source 1..41: mol_type = other RNA
taatttctactaagtgtagatccgggtcaggtaatatggat

SEQ ID NO: 790 - RNA, 41 nt, synthetic construct
  misc_feature 1..41: note = Description of Artificial Sequence: Synthetic oligonucleotide
  source 1..41: mol_type = other RNA
taatttctactaagtgtagattccgggagtgctaatgcagc

SEQ ID NO: 791 - RNA, 41 nt, synthetic construct
  misc_feature 1..41: note = Description of Artificial Sequence: Synthetic oligonucleotide
  source 1..41: mol_type = other RNA
taatttctactaagtgtagataccgcaggcgtggcgatagc

SEQ ID NO: 792 - RNA, 41 nt, synthetic construct
  misc_feature 1..41: note = Description of Artificial Sequence: Synthetic oligonucleotide
  source 1..41: mol_type = other RNA
taatttctactaagtgtagatatttttggcggccaatcgca

SEQ ID NO: 793 - RNA, 41 nt, synthetic construct
  misc_feature 1..41: note = Description of Artificial Sequence: Synthetic oligonucleotide
  source 1..41: mol_type = other RNA
taatttctactaagtgtagatttagccggaaccttgaccgc

SEQ ID NO: 794 - RNA, 41 nt, synthetic construct
  misc_feature 1..41: note = Description of Artificial Sequence: Synthetic oligonucleotide
  source 1..41: mol_type = other RNA
taatttctactaagtgtagatccgcggtgttaatcccaccg

SEQ ID NO: 795 - RNA, 41 nt, synthetic construct
  misc_feature 1..41: note = Description of Artificial Sequence: Synthetic oligonucleotide
  source 1..41: mol_type = other RNA
taatttctactaagtgtagatagacgttcaagcgctgttaa

SEQ ID NO: 796 - RNA, 41 nt, synthetic construct
  misc_feature 1..41: note = Description of Artificial Sequence: Synthetic oligonucleotide
  source 1..41: mol_type = other RNA
taatttctactaagtgtagatcaaaagatgttttccagctg

SEQ ID NO: 797 - RNA, 41 nt, synthetic construct
  misc_feature 1..41: note = Description of Artificial Sequence: Synthetic oligonucleotide
  source 1..41: mol_type = other RNA
taatttctactaagtgtagatgcacctagcggtagtaacat

SEQ ID NO: 798 - RNA, 41 nt, synthetic construct
  misc_feature 1..41: note = Description of Artificial Sequence: Synthetic oligonucleotide
  source 1..41: mol_type = other RNA
taatttctactaagtgtagatgtacacttcttggtggcgca

SEQ ID NO: 799 - RNA, 41 nt, synthetic construct
  misc_feature 1..41: note = Description of Artificial Sequence: Synthetic oligonucleotide
  source 1..41: mol_type = other RNA
taatttctactaagtgtagatcaggttgacggcatgcatta

SEQ ID NO: 800 - RNA, 41 nt, synthetic construct
  misc_feature 1..41: note = Description of Artificial Sequence: Synthetic oligonucleotide
  source 1..41: mol_type = other RNA
taatttctactaagtgtagattcataccgcccggaccgtta

SEQ ID NO: 801 - RNA, 41 nt, synthetic construct
  misc_feature 1..41: note = Description of Artificial Sequence: Synthetic oligonucleotide
  source 1..41: mol_type = other RNA
taatttctactaagtgtagatcaagcctgtaacggtccggg

SEQ ID NO: 802 - RNA, 41 nt, synthetic construct
  misc_feature 1..41: note = Description of Artificial Sequence: Synthetic oligonucleotide
  source 1..41: mol_type = other RNA
taatttctactaagtgtagatcagaacctcattataattga

SEQ ID NO: 803 - RNA, 41 nt, synthetic construct
  misc_feature 1..41: note = Description of Artificial Sequence: Synthetic oligonucleotide
  source 1..41: mol_type = other RNA
taatttctactaagtgtagatatgcgatcaagtcgggcgct

SEQ ID NO: 804 - RNA, 41 nt, synthetic construct
  misc_feature 1..41: note = Description of Artificial Sequence: Synthetic oligonucleotide
  source 1..41: mol_type = other RNA
taatttctactaagtgtagattatcgttgcgcgtaaggatg

SEQ ID NO: 805 - RNA, 41 nt, synthetic construct
  misc_feature 1..41: note = Description of Artificial Sequence: Synthetic oligonucleotide
  source 1..41: mol_type = other RNA
taatttctactaagtgtagatacgcgcaacgatatggatcg

SEQ ID NO: 806 - RNA, 41 nt, synthetic construct
  misc_feature 1..41: note = Description of Artificial Sequence: Synthetic oligonucleotide
  source 1..41: mol_type = other RNA
taatttctactaagtgtagatttcacacttttcgggatgcg

SEQ ID NO: 807 - RNA, 41 nt, synthetic construct
  misc_feature 1..41: note = Description of Artificial Sequence: Synthetic oligonucleotide
  source 1..41: mol_type = other RNA
taatttctactaagtgtagatactgccctactgccctactg

SEQ ID NO: 808 - RNA, 41 nt, synthetic construct
  misc_feature 1..41: note = Description of Artificial Sequence: Synthetic oligonucleotide
  source 1..41: mol_type = other RNA
taatttctactaagtgtagatcacttttggctcgaaaatgc

SEQ ID NO: 809 - RNA, 50 nt, synthetic construct
  misc_feature 1..50: note = Description of Artificial Sequence: Synthetic oligonucleotide
  source 1..50: mol_type = other RNA
gccaccccaaaaatgaaggggactaaaacactacgtaatacttcagaacg

SEQ ID NO: 810 - RNA, 50 nt, synthetic construct
  misc_feature 1..50: note = Description of Artificial Sequence: Synthetic oligonucleotide
  source 1..50: mol_type = other RNA
gccaccccaaaaatgaaggggactaaaacagtcaaggaagctacgtaata

SEQ ID NO: 811 - RNA, 50 nt, synthetic construct
  misc_feature 1..50: note = Description of Artificial Sequence: Synthetic oligonucleotide
  source 1..50: mol_type = other RNA
gccaccccaaaaatgaaggggactaaaacagtaatacttcagaacggctt

SEQ ID NO: 812 - RNA, 50 nt, synthetic construct
  misc_feature 1..50: note = Description of Artificial Sequence: Synthetic oligonucleotide
  source 1..50: mol_type = other RNA
gccaccccaaaaatgaaggggactaaaacaagctgaagctacttgttact

SEQ ID NO: 813 - RNA, 50 nt, synthetic construct
  misc_feature 1..50: note = Description of Artificial Sequence: Synthetic oligonucleotide
  source 1..50: mol_type = other RNA
gccaccccaaaaatgaaggggactaaaacaagctacttgttactaaaggt

SEQ ID NO: 814 - RNA, 50 nt, synthetic construct
  misc_feature 1..50: note = Description of Artificial Sequence: Synthetic oligonucleotide
  source 1..50: mol_type = other RNA
gccaccccaaaaatgaaggggactaaaacattgttactaaaggtaaggag

SEQ ID NO: 815 - RNA, 50 nt, synthetic construct
  misc_feature 1..50: note = Description of Artificial Sequence: Synthetic oligonucleotide
  source 1..50: mol_type = other RNA
gccaccccaaaaatgaaggggactaaaacatctaggaagctacgtaagac

SEQ ID NO: 816 - RNA, 50 nt, synthetic construct
  misc_feature 1..50: note = Description of Artificial Sequence: Synthetic oligonucleotide
  source 1..50: mol_type = other RNA
gccaccccaaaaatgaaggggactaaaacagcggctagggtggcgtaact

SEQ ID NO: 817 - RNA, 50 nt, synthetic construct
  misc_feature 1..50: note = Description of Artificial Sequence: Synthetic oligonucleotide
  source 1..50: mol_type = other RNA
gccaccccaaaaatgaaggggactaaaacagcgtaacttacgcagtgcct

SEQ ID NO: 818 - RNA, 50 nt, synthetic construct
  misc_feature 1..50: note = Description of Artificial Sequence: Synthetic oligonucleotide
  source 1..50: mol_type = other RNA
gccaccccaaaaatgaaggggactaaaacacgcccattaagcatgagaac

SEQ ID NO: 819 - RNA, 50 nt, synthetic construct
  misc_feature 1..50: note = Description of Artificial Sequence: Synthetic oligonucleotide
  source 1..50: mol_type = other RNA
gccaccccaaaaatgaaggggactaaaacagcatgagaacatgcgatcag

SEQ ID NO: 820 - RNA, 50 nt, synthetic construct
  misc_feature 1..50: note = Description of Artificial Sequence: Synthetic oligonucleotide
  source 1..50: mol_type = other RNA
gccaccccaaaaatgaaggggactaaaacagcgatcagcttcaattgcat

SEQ ID NO: 821 - RNA, 50 nt, synthetic construct
  misc_feature 1..50: note = Description of Artificial Sequence: Synthetic oligonucleotide
  source 1..50: mol_type = other RNA
gccaccccaaaaatgaaggggactaaaacaagcatgagaacatacgatct

SEQ ID NO: 822 - RNA, 50 nt, synthetic construct
  misc_feature 1..50: note = Description of Artificial Sequence: Synthetic oligonucleotide
  source 1..50: mol_type = other RNA
gccaccccaaaaatgaaggggactaaaacagtcatcacccattaagcatg

SEQ ID NO: 823 - RNA, 50 nt, synthetic construct
  misc_feature 1..50: note = Description of Artificial Sequence: Synthetic oligonucleotide
  source 1..50: mol_type = other RNA
gccaccccaaaaatgaaggggactaaaacacacccattaagcatgagaac

SEQ ID NO: 824 - RNA, 50 nt, synthetic construct
  misc_feature 1..50: note = Description of Artificial Sequence: Synthetic oligonucleotide
  source 1..50: mol_type = other RNA
gccaccccaaaaatgaaggggactaaaacactttcctgcagctcttttaa

SEQ ID NO: 825 - RNA, 50 nt, synthetic construct
  misc_feature 1..50: note = Description of Artificial Sequence: Synthetic oligonucleotide
  source 1..50: mol_type = other RNA
gccaccccaaaaatgaaggggactaaaacaagctcttttaacagctgctt

SEQ ID NO: 826 - RNA, 50 nt, synthetic construct
  misc_feature 1..50: note = Description of Artificial Sequence: Synthetic oligonucleotide
  source 1..50: mol_type = other RNA
gccaccccaaaaatgaaggggactaaaacagaagaagcttttggagcgtg

SEQ ID NO: 827 - RNA, 50 nt, synthetic construct
  misc_feature 1..50: note = Description of Artificial Sequence: Synthetic oligonucleotide
  source 1..50: mol_type = other RNA
gccaccccaaaaatgaaggggactaaaacaatgcccgtcacgtggcgttg

SEQ ID NO: 828 - RNA, 50 nt, synthetic construct
  misc_feature 1..50: note = Description of Artificial Sequence: Synthetic oligonucleotide
  source 1..50: mol_type = other RNA
gccaccccaaaaatgaaggggactaaaacaggtagtcgctggcggccttc

SEQ ID NO: 829 - RNA, 50 nt, synthetic construct
  misc_feature 1..50: note = Description of Artificial Sequence: Synthetic oligonucleotide
  source 1..50: mol_type = other RNA
gccaccccaaaaatgaaggggactaaaacatgcaaacagcggatgcccgt

SEQ ID NO: 830 - RNA, 50 nt, synthetic construct
  misc_feature 1..50: note = Description of Artificial Sequence: Synthetic oligonucleotide
  source 1..50: mol_type = other RNA
gccaccccaaaaatgaaggggactaaaacaagctctcctgcagttctttc

SEQ ID NO: 831 - RNA, 50 nt, synthetic construct
  misc_feature 1..50: note = Description of Artificial Sequence: Synthetic oligonucleotide
  source 1..50: mol_type = other RNA
gccaccccaaaaatgaaggggactaaaacagccaaagctctcctgcagtt

SEQ ID NO: 832 - RNA, 50 nt, synthetic construct
  misc_feature 1..50: note = Description of Artificial Sequence: Synthetic oligonucleotide
  source 1..50: mol_type = other RNA
gccaccccaaaaatgaaggggactaaaacactgcagttctttcagcagct

SEQ ID NO: 833 - RNA, 50 nt, synthetic construct
  misc_feature 1..50: note = Description of Artificial Sequence: Synthetic oligonucleotide
  source 1..50: mol_type = other RNA
gccaccccaaaaatgaaggggactaaaacaatgcccgtcacgcggcgttg

SEQ ID NO: 834 - RNA, 50 nt, synthetic construct
  misc_feature 1..50: note = Description of Artificial Sequence: Synthetic oligonucleotide
  source 1..50: mol_type = other RNA
gccaccccaaaaatgaaggggactaaaacagtggaattggcaggccacga

SEQ ID NO: 835 - RNA, 50 nt, synthetic construct
  misc_feature 1..50: note = Description of Artificial Sequence: Synthetic oligonucleotide
  source 1..50: mol_type = other RNA
gccaccccaaaaatgaaggggactaaaacagggttaaatcgtcgaagaat

SEQ ID NO: 836 - RNA, 50 nt, synthetic construct
  misc_feature 1..50: note = Description of Artificial Sequence: Synthetic oligonucleotide
  source 1..50: mol_type = other RNA
gccaccccaaaaatgaaggggactaaaacatttcctgaagctctttcagc

SEQ ID NO: 837 - RNA, 50 nt, synthetic construct
  misc_feature 1..50: note = Description of Artificial Sequence: Synthetic oligonucleotide
  source 1..50: mol_type = other RNA
gccaccccaaaaatgaaggggactaaaacacgtcgaagaattttttgacg

SEQ ID NO: 838 - RNA, 50 nt, synthetic construct
  misc_feature 1..50: note = Description of Artificial Sequence: Synthetic oligonucleotide
  source 1..50: mol_type = other RNA
gccaccccaaaaatgaaggggactaaaacaactggcaggcaacaaaccat

SEQ ID NO: 839 - RNA, 50 nt, synthetic construct
  misc_feature 1..50: note = Description of Artificial Sequence: Synthetic oligonucleotide
  source 1..50: mol_type = other RNA
gccaccccaaaaatgaaggggactaaaacagggtcaagtcgtcgaagaat

SEQ ID NO: 840 - RNA, 50 nt, synthetic construct
  misc_feature 1..50: note = Description of Artificial Sequence: Synthetic oligonucleotide
  source 1..50: mol_type = other RNA
gccaccccaaaaatgaaggggactaaaacaagtcgtcgaagaattttttg

SEQ ID NO: 841 - RNA, 50 nt, synthetic construct
  misc_feature 1..50: note = Description of Artificial Sequence: Synthetic oligonucleotide
  source 1..50: mol_type = other RNA
gccaccccaaaaatgaaggggactaaaacatgcagctctttcagtagctg

SEQ ID NO: 842 - RNA, 50 nt, synthetic construct
  misc_feature 1..50: note = Description of Artificial Sequence: Synthetic oligonucleotide
  source 1..50: mol_type = other RNA
gccaccccaaaaatgaaggggactaaaacaaatcgctggcggctttcaca

SEQ ID NO: 843 - RNA, 50 nt, synthetic construct
  misc_feature 1..50: note = Description of Artificial Sequence: Synthetic oligonucleotide
  source 1..50: mol_type = other RNA
gccaccccaaaaatgaaggggactaaaacaaactttcctgcagctctttc

SEQ ID NO: 844 - RNA, 50 nt, synthetic construct
  misc_feature 1..50: note = Description of Artificial Sequence: Synthetic oligonucleotide
  source 1..50: mol_type = other RNA
gccaccccaaaaatgaaggggactaaaacaggccgccaaaactttcctgc

SEQ ID NO: 845 - RNA, 50 nt, synthetic construct
  misc_feature 1..50: note = Description of Artificial Sequence: Synthetic oligonucleotide
  source 1..50: mol_type = other RNA
gccaccccaaaaatgaaggggactaaaacatgcagctctttcagcagctg

SEQ ID NO: 846 - RNA, 50 nt, synthetic construct
  misc_feature 1..50: note = Description of Artificial Sequence: Synthetic oligonucleotide
  source 1..50: mol_type = other RNA
gccaccccaaaaatgaaggggactaaaacaattggcaggcaacgaaccat

SEQ ID NO: 847 - RNA, 50 nt, synthetic construct
  misc_feature 1..50: note = Description of Artificial Sequence: Synthetic oligonucleotide
  source 1..50: mol_type = other RNA
gccaccccaaaaatgaaggggactaaaacacccgtcgcgcggcgtagaag

SEQ ID NO: 848 - RNA, 50 nt, synthetic construct
  misc_feature 1..50: note = Description of Artificial Sequence: Synthetic oligonucleotide
  source 1..50: mol_type = other RNA
gccaccccaaaaatgaaggggactaaaacaagtcgctggcggccttcaca

SEQ ID NO: 849 - RNA, 50 nt, synthetic construct
  misc_feature 1..50: note = Description of Artificial Sequence: Synthetic oligonucleotide
  source 1..50: mol_type = other RNA
gccaccccaaaaatgaaggggactaaaacaaccaaagctttcctgcagct

SEQ ID NO: 850 - RNA, 50 nt, synthetic construct
  misc_feature 1..50: note = Description of Artificial Sequence: Synthetic oligonucleotide
  source 1..50: mol_type = other RNA
gccaccccaaaaatgaaggggactaaaacatttctcacccgtcgggccac

SEQ ID NO: 851 - RNA, 50 nt, synthetic construct
  misc_feature 1..50: note = Description of Artificial Sequence: Synthetic oligonucleotide
  source 1..50: mol_type = other RNA
gccaccccaaaaatgaaggggactaaaacaagcgcgttaaatcatcgaag

SEQ ID NO: 852 - RNA, 41 nt, synthetic construct
  misc_feature 1..41: note = Description of Artificial Sequence: Synthetic oligonucleotide
  source 1..41: mol_type = other RNA
taatttctactaagtgtagatgggatacagacgacggtacc

SEQ ID NO: 853 - RNA, 41 nt, synthetic construct
  misc_feature 1..41: note = Description of Artificial Sequence: Synthetic oligonucleotide
  source 1..41: mol_type = other RNA
taatttctactaagtgtagataggtggcttacacggcgtag

SEQ ID NO: 854 - RNA, 41 nt, synthetic construct
  misc_feature 1..41: note = Description of Artificial Sequence: Synthetic oligonucleotide
  source 1..41: mol_type = other RNA
taatttctactaagtgtagatcatttaacgatttaccgtgc

SEQ ID NO: 855 - RNA, 41 nt, synthetic construct
  misc_feature 1..41: note = Description of Artificial Sequence: Synthetic oligonucleotide
  source 1..41: mol_type = other RNA
taatttctactaagtgtagatctgtgacgaaattattgtca

SEQ ID NO: 856 - RNA, 41 nt, synthetic construct
  misc_feature 1..41: note = Description of Artificial Sequence: Synthetic oligonucleotide
  source 1..41: mol_type = other RNA
taatttctactaagtgtagatttcttaccattctgcatgca

SEQ ID NO: 857 - RNA, 41 nt, synthetic construct
  misc_feature 1..41: note = Description of Artificial Sequence: Synthetic oligonucleotide
  source 1..41: mol_type = other RNA
taatttctactaagtgtagatgggatacagacgacggtact

SEQ ID NO: 858 - RNA, 41 nt, synthetic construct
  misc_feature 1..41: note = Description of Artificial Sequence: Synthetic oligonucleotide
  source 1..41: mol_type = other RNA
taatttctactaagtgtagatgtggtggccgcggtcgtcaa

SEQ ID NO: 859 - RNA, 41 nt, synthetic construct
  misc_feature 1..41: note = Description of Artificial Sequence: Synthetic oligonucleotide
  source 1..41: mol_type = other RNA
taatttctactaagtgtagatcgccgtccagcaggcgtgtc

SEQ ID NO: 860 - RNA, 41 nt, synthetic construct
  misc_feature 1..41: note = Description of Artificial Sequence: Synthetic oligonucleotide
  source 1..41: mol_type = other RNA
taatttctactaagtgtagatatgaccagtacggtcacgca

SEQ ID NO: 861 - RNA, 41 nt, synthetic construct
  misc_feature 1..41: note = Description of Artificial Sequence: Synthetic oligonucleotide
  source 1..41: mol_type = other RNA
taatttctactaagtgtagatagacctgtccaacctgtcac

SEQ ID NO: 862 - RNA, 41 nt, synthetic construct
  misc_feature 1..41: note = Description of Artificial Sequence: Synthetic oligonucleotide
  source 1..41: mol_type = other RNA
taatttctactaagtgtagatcgctggaagagtgtgacgtt

SEQ ID NO: 863 - RNA, 41 nt, synthetic construct
  misc_feature 1..41: note = Description of Artificial Sequence: Synthetic oligonucleotide
  source 1..41: mol_type = other RNA
taatttctactaagtgtagatacctgcgctacaacatggag

SEQ ID NO: 864 - RNA, 41 nt, synthetic construct
  misc_feature 1..41: note = Description of Artificial Sequence: Synthetic oligonucleotide
  source 1..41: mol_type = other RNA
taatttctactaagtgtagataagaacgcattgttgcgggt

SEQ ID NO: 865 - RNA, 41 nt, synthetic construct
  misc_feature 1..41: note = Description of Artificial Sequence: Synthetic oligonucleotide
  source 1..41: mol_type = other RNA
taatttctactaagtgtagattggtgactacctgggtgcaa

SEQ ID NO: 866 - RNA, 41 nt, synthetic construct
  misc_feature 1..41: note = Description of Artificial Sequence: Synthetic oligonucleotide
  source 1..41: mol_type = other RNA
taatttctactaagtgtagatgccactacgagcgtttcatc

SEQ ID NO: 867 - RNA, 41 nt, synthetic construct
  misc_feature 1..41: note = Description of Artificial Sequence: Synthetic oligonucleotide
  source 1..41: mol_type = other RNA
taatttctactaagtgtagatttaaagagcgtgtccttgcc

SEQ ID NO: 868 - RNA, 41 nt, synthetic construct
  misc_feature 1..41: note = Description of Artificial Sequence: Synthetic oligonucleotide
  source 1..41: mol_type = other RNA
taatttctactaagtgtagattgcaggtcatcccacacatc

SEQ ID NO: 869 - RNA, 41 nt, synthetic construct
  misc_feature 1..41: note = Description of Artificial Sequence: Synthetic oligonucleotide
  source 1..41: mol_type = other RNA
taatttctactaagtgtagataccgtaatcagggtgacaaa

SEQ ID NO: 870 - RNA, 41 nt, synthetic construct
  misc_feature 1..41: note = Description of Artificial Sequence: Synthetic oligonucleotide
  source 1..41: mol_type = other RNA
taatttctactaagtgtagatcaacatggagctgacgcttg

SEQ ID NO: 871 - RNA, 41 nt, synthetic construct
  misc_feature 1..41: note = Description of Artificial Sequence: Synthetic oligonucleotide
  source 1..41: mol_type = other RNA
taatttctactaagtgtagatatgatcagtacggtcacgcg

SEQ ID NO: 872 - RNA, 41 nt, synthetic construct
  misc_feature 1..41: note = Description of Artificial Sequence: Synthetic oligonucleotide
  source 1..41: mol_type = other RNA
taatttctactaagtgtagataggttatcccacacatcact

SEQ ID NO: 873 - RNA, 41 nt, synthetic construct
  misc_feature 1..41: note = Description of Artificial Sequence: Synthetic oligonucleotide
  source 1..41: mol_type = other RNA
taatttctactaagtgtagatcgactggccgcatctactcc

SEQ ID NO: 874 - RNA, 41 nt, synthetic construct
  misc_feature 1..41: note = Description of Artificial Sequence: Synthetic oligonucleotide
  source 1..41: mol_type = other RNA
taatttctactaagtgtagatgtacatcaacgtcgatcctg

SEQ ID NO: 875 - RNA, 41 nt, synthetic construct
  misc_feature 1..41: note = Description of Artificial Sequence: Synthetic oligonucleotide
  source 1..41: mol_type = other RNA
taatttctactaagtgtagatcagtacagcaggcctgtcct

SEQ ID NO: 876 - RNA, 41 nt, synthetic construct
  misc_feature 1..41: note = Description of Artificial Sequence: Synthetic oligonucleotide
  source 1..41: mol_type = other RNA
taatttctactaagtgtagatcggtgtcaccaaagagatcc

SEQ ID NO: 877 - RNA, 41 nt, synthetic construct
  misc_feature 1..41: note = Description of Artificial Sequence: Synthetic oligonucleotide
  source 1..41: mol_type = other RNA
taatttctactaagtgtagatatttcagcgacatcttcggc

SEQ ID NO: 878 - RNA, 41 nt, synthetic construct
  misc_feature 1..41: note = Description of Artificial Sequence: Synthetic oligonucleotide
  source 1..41: mol_type = other RNA
taatttctactaagtgtagattggtgattatcttggtgcta

SEQ ID NO: 879 - RNA, 41 nt, synthetic construct
  misc_feature 1..41: note = Description of Artificial Sequence: Synthetic oligonucleotide
  source 1..41: mol_type = other RNA
taatttctactaagtgtagatttgcgggcggcgaaggccac

SEQ ID NO: 880 - RNA, 41 nt, synthetic construct
  misc_feature 1..41: note = Description of Artificial Sequence: Synthetic oligonucleotide
  source 1..41: mol_type = other RNA
taatttctactaagtgtagattccgcactaaaatgacccgt

SEQ ID NO: 881 - RNA, 41 nt, synthetic construct
  misc_feature 1..41: note = Description of Artificial Sequence: Synthetic oligonucleotide
  source 1..41: mol_type = other RNA
taatttctactaagtgtagatacctgcgctacaacatggat

SEQ ID NO: 882 - RNA, 41 nt, synthetic construct
  misc_feature 1..41: note = Description of Artificial Sequence: Synthetic oligonucleotide
  source 1..41: mol_type = other RNA
taatttctactaagtgtagatcgaacaaggcggcatgggcg

SEQ ID NO: 883 - RNA, 41 nt, synthetic construct
  misc_feature 1..41: note = Description of Artificial Sequence: Synthetic oligonucleotide
  source 1..41: mol_type = other RNA
taatttctactaagtgtagatcggcgacatttttggcggcg

SEQ ID NO: 884 - RNA, 41 nt, synthetic construct
  misc_feature 1..41: note = Description of Artificial Sequence: Synthetic oligonucleotide
  source 1..41: mol_type = other RNA
taatttctactaagtgtagatattggcaggcaacgaaccat

SEQ ID NO: 885 - RNA, 41 nt, synthetic construct
  misc_feature 1..41: note = Description of Artificial Sequence: Synthetic oligonucleotide
  source 1..41: mol_type = other RNA
taatttctactaagtgtagatcccgtcgcgcggcgtagaag

SEQ ID NO: 886 - RNA, 41 nt, synthetic construct
  misc_feature 1..41: note = Description of Artificial Sequence: Synthetic oligonucleotide
  source 1..41: mol_type = other RNA
taatttctactaagtgtagatagtcgctggcggccttcaca

SEQ ID NO: 887 - RNA, 41 nt, synthetic construct
  misc_feature 1..41: note = Description of Artificial Sequence: Synthetic oligonucleotide
  source 1..41: mol_type = other RNA
taatttctactaagtgtagataccaaagctttcctgcagct

SEQ ID NO: 888 - RNA, 41 nt, synthetic construct
  misc_feature 1..41: note = Description of Artificial Sequence: Synthetic oligonucleotide
  source 1..41: mol_type = other RNA
taatttctactaagtgtagatagcgcgttaaatcatcgaag

SEQ ID NO: 889 - RNA, 41 nt, synthetic construct
  misc_feature 1..41: note = Description of Artificial Sequence: Synthetic oligonucleotide
  source 1..41: mol_type = other RNA
taatttctactaagtgtagattttctcacccgtcgggccac

SEQ ID NO: 890 - RNA, 50 nt, synthetic construct
  misc_feature 1..50: note = Description of Artificial Sequence: Synthetic oligonucleotide
  source 1..50: mol_type = other RNA
gccaccccaaaaatgaaggggactaaaacagctcgtcaatgcgatctttg

SEQ ID NO: 891 - RNA, 50 nt, synthetic construct
  misc_feature 1..50: note = Description of Artificial Sequence: Synthetic oligonucleotide
  source 1..50: mol_type = other RNA
gccaccccaaaaatgaaggggactaaaacaaaatttcttgtaaagaagaa

SEQ ID NO: 892 - RNA, 50 nt, synthetic construct
  misc_feature 1..50: note = Description of Artificial Sequence: Synthetic oligonucleotide
  source 1..50: mol_type = other RNA
gccaccccaaaaatgaaggggactaaaacagagtgccttatctcgacttt

SEQ ID NO: 893 - RNA, 50 nt, synthetic construct
  misc_feature 1..50: note = Description of Artificial Sequence: Synthetic oligonucleotide
  source 1..50: mol_type = other RNA
gccaccccaaaaatgaaggggactaaaacacatcacatctttccatgtta

SEQ ID NO: 894 - RNA, 50 nt, synthetic construct
  misc_feature 1..50: note = Description of Artificial Sequence: Synthetic oligonucleotide
  source 1..50: mol_type = other RNA
gccaccccaaaaatgaaggggactaaaacatagtcggttccgctgcagag

SEQ ID NO: 895 - RNA, 50 nt, synthetic construct
  misc_feature 1..50: note = Description of Artificial Sequence: Synthetic oligonucleotide
  source 1..50: mol_type = other RNA
gccaccccaaaaatgaaggggactaaaacaacggacacccaaagtagtcg

SEQ ID NO: 896 - RNA, 50 nt, synthetic construct
  misc_feature 1..50: note = Description of Artificial Sequence: Synthetic oligonucleotide
  source 1..50: mol_type = other RNA
gccaccccaaaaatgaaggggactaaaacaccaaagtagtcggttccgct

SEQ ID NO: 897 - RNA, 50 nt, synthetic construct
  misc_feature 1..50: note = Description of Artificial Sequence: Synthetic oligonucleotide
  source 1..50: mol_type = other RNA
gccaccccaaaaatgaaggggactaaaacaaggaaacacggacacccaaa

SEQ ID NO: 898 - RNA, 50 nt, synthetic construct
  misc_feature 1..50: note = Description of Artificial Sequence: Synthetic oligonucleotide
  source 1..50: mol_type = other RNA
gccaccccaaaaatgaaggggactaaaacatgttgacgatggtcattttg

SEQ ID NO: 899 - RNA, 50 nt, synthetic construct
  misc_feature 1..50: note = Description of Artificial Sequence: Synthetic oligonucleotide
  source 1..50: mol_type = other RNA
gccaccccaaaaatgaaggggactaaaacattgaagtgtacagcaggcag

SEQ ID NO: 900 - RNA, 50 nt, synthetic construct
  misc_feature 1..50: note = Description of Artificial Sequence: Synthetic oligonucleotide
  source 1..50: mol_type = other RNA
gccaccccaaaaatgaaggggactaaaacagacttgagatattgatgcat

SEQ ID NO: 901 - RNA, 50 nt, synthetic construct
  misc_feature 1..50: note = Description of Artificial Sequence: Synthetic oligonucleotide
  source 1..50: mol_type = other RNA
gccaccccaaaaatgaaggggactaaaacaacaagtagtgctggtctaag

SEQ ID NO: 902 - RNA, 50 nt, synthetic construct
  misc_feature 1..50: note = Description of Artificial Sequence: Synthetic oligonucleotide
  source 1..50: mol_type = other RNA
gccaccccaaaaatgaaggggactaaaacaacaagatggcctacattggc

SEQ ID NO: 903 - RNA, 50 nt, synthetic construct
  misc_feature 1..50: note = Description of Artificial Sequence: Synthetic oligonucleotide
  source 1..50: mol_type = other RNA
gccaccccaaaaatgaaggggactaaaacagaaaaacttaggattaaaga

SEQ ID NO: 904 - RNA, 50 nt, synthetic construct
  misc_feature 1..50: note = Description of Artificial Sequence: Synthetic oligonucleotide
  source 1..50: mol_type = other RNA
gccaccccaaaaatgaaggggactaaaacattagctgcttacgaacagtt

SEQ ID NO: 905 - RNA, 50 nt, synthetic construct
  misc_feature 1..50: note = Description of Artificial Sequence: Synthetic oligonucleotide
  source 1..50: mol_type = other RNA
gccaccccaaaaatgaaggggactaaaacatagacccacaagattataca

SEQ ID NO: 906 - RNA, 50 nt, synthetic construct
  misc_feature 1..50: note = Description of Artificial Sequence: Synthetic oligonucleotide
  source 1..50: mol_type = other RNA
gccaccccaaaaatgaaggggactaaaacagactccaacttcacggggtc

SEQ ID NO: 907 - RNA, 50 nt, synthetic construct
  misc_feature 1..50: note = Description of Artificial Sequence: Synthetic oligonucleotide
  source 1..50: mol_type = other RNA
gccaccccaaaaatgaaggggactaaaacaaacttcacggggtcgagttg

SEQ ID NO: 908 - RNA, 50 nt, synthetic construct
  misc_feature 1..50: note = Description of Artificial Sequence: Synthetic oligonucleotide
  source 1..50: mol_type = other RNA
gccaccccaaaaatgaaggggactaaaacatagcgactccaacttcacgg

SEQ ID NO: 909 - RNA, 50 nt, synthetic construct
  misc_feature 1..50: note = Description of Artificial Sequence: Synthetic oligonucleotide
  source 1..50: mol_type = other RNA
gccaccccaaaaatgaaggggactaaaacatccatggcctcggcgatcag

SEQ ID NO: 910 - RNA, 50 nt, synthetic construct
  misc_feature 1..50: note = Description of Artificial Sequence: Synthetic oligonucleotide
  source 1..50: mol_type = other RNA
gccaccccaaaaatgaaggggactaaaacatgtccatggcctcggcgatc

SEQ ID NO: 911 - RNA, 50 nt, synthetic construct
  misc_feature 1..50: note = Description of Artificial Sequence: Synthetic oligonucleotide
  source 1..50: mol_type = other RNA
gccaccccaaaaatgaaggggactaaaacagatcagctcaccgatggacg

SEQ ID NO: 912 - RNA, 50 nt, synthetic construct
  misc_feature 1..50: note = Description of Artificial Sequence: Synthetic oligonucleotide
  source 1..50: mol_type = other RNA
gccaccccaaaaatgaaggggactaaaacataggggacggtgtcgtcgtt

SEQ ID NO: 913 - RNA, 50 nt, synthetic construct
  misc_feature 1..50: note = Description of Artificial Sequence: Synthetic oligonucleotide
  source 1..50: mol_type = other RNA
gccaccccaaaaatgaaggggactaaaacacggctggagaagatcttccc

SEQ ID NO: 914 - RNA, 50 nt, synthetic construct
  misc_feature 1..50: note = Description of Artificial Sequence: Synthetic oligonucleotide
  source 1..50: mol_type = other RNA
gccaccccaaaaatgaaggggactaaaacaggcgaagaagccgtagtagc

SEQ ID NO: 915 - RNA, 50 nt, synthetic construct
  misc_feature 1..50: note = Description of Artificial Sequence: Synthetic oligonucleotide
  source 1..50: mol_type = other RNA
gccaccccaaaaatgaaggggactaaaacaaggatggagtcgacctcgtc

SEQ ID NO: 916 - RNA, 50 nt, synthetic construct
  misc_feature 1..50: note = Description of Artificial Sequence: Synthetic oligonucleotide
  source 1..50: mol_type = other RNA
gccaccccaaaaatgaaggggactaaaacagatgtcgacctcgtagtgca

SEQ ID NO: 917 - RNA, 50 nt, synthetic construct
  misc_feature 1..50: note = Description of Artificial Sequence: Synthetic oligonucleotide
  source 1..50: mol_type = other RNA
gccaccccaaaaatgaaggggactaaaacatcgacctcgtcgaccacggc

SEQ ID NO: 918 - RNA, 50 nt, synthetic construct
  misc_feature 1..50: note = Description of Artificial Sequence: Synthetic oligonucleotide
  source 1..50: mol_type = other RNA
gccaccccaaaaatgaaggggactaaaacatgctcccacatgtcgacctg

SEQ ID NO: 919 - RNA, 50 nt, synthetic construct
  misc_feature 1..50: note = Description of Artificial Sequence: Synthetic oligonucleotide
  source 1..50: mol_type = other RNA
gccaccccaaaaatgaaggggactaaaacagaaggtcagcagcttctggc

SEQ ID NO: 920 - RNA, 50 nt, synthetic construct
  misc_feature 1..50: note = Description of Artificial Sequence: Synthetic oligonucleotide
  source 1..50: mol_type = other RNA
gccaccccaaaaatgaaggggactaaaacagctggaaggtcagcagcttc

SEQ ID NO: 921 - RNA, 50 nt, synthetic construct
  misc_feature 1..50: note = Description of Artificial Sequence: Synthetic oligonucleotide
  source 1..50: mol_type = other RNA
gccaccccaaaaatgaaggggactaaaacacgccaatccggagatctcac

SEQ ID NO: 922 - RNA, 50 nt, synthetic construct
  misc_feature 1..50: note = Description of Artificial Sequence: Synthetic oligonucleotide
  source 1..50: mol_type = other RNA
gccaccccaaaaatgaaggggactaaaacatcaacgcgagctggtgactc

SEQ ID NO: 923 - RNA, 50 nt, synthetic construct
  misc_feature 1..50: note = Description of Artificial Sequence: Synthetic oligonucleotide
  source 1..50: mol_type = other RNA
gccaccccaaaaatgaaggggactaaaacagactcacgcttactaggtat

SEQ ID NO: 924 - RNA, 50 nt, synthetic construct
  misc_feature 1..50: note = Description of Artificial Sequence: Synthetic oligonucleotide
  source 1..50: mol_type = other RNA
gccaccccaaaaatgaaggggactaaaacactcgtcccgggattgaaccg

SEQ ID NO: 925 - RNA, 50 nt, synthetic construct
  misc_feature 1..50: note = Description of Artificial Sequence: Synthetic oligonucleotide
  source 1..50: mol_type = other RNA
gccaccccaaaaatgaaggggactaaaacacgaaacggctatgccaccga

SEQ ID NO: 926 - RNA, 50 nt, synthetic construct
  misc_feature 1..50: note = Description of Artificial Sequence: Synthetic oligonucleotide
  source 1..50: mol_type = other RNA
gccaccccaaaaatgaaggggactaaaacatcggtggcatagccgtttcg

SEQ ID NO: 927 - RNA, 50 nt, synthetic construct
  misc_feature 1..50: note = Description of Artificial Sequence: Synthetic oligonucleotide
  source 1..50: mol_type = other RNA
gccaccccaaaaatgaaggggactaaaacagcgaaacttattacgccggg

SEQ ID NO: 928 - RNA, 50 nt, synthetic construct
  misc_feature 1..50: note = Description of Artificial Sequence: Synthetic oligonucleotide
  source 1..50: mol_type = other RNA
gccaccccaaaaatgaaggggactaaaacaacttattacgccgggctgac

SEQ ID NO: 929 - RNA, 50 nt, synthetic construct
  misc_feature 1..50: note = Description of Artificial Sequence: Synthetic oligonucleotide
  source 1..50: mol_type = other RNA
gccaccccaaaaatgaaggggactaaaacataaggcgagccgacgtcctt

SEQ ID NO: 930 - RNA, 50 nt, synthetic construct
  misc_feature 1..50: note = Description of Artificial Sequence: Synthetic oligonucleotide
  source 1..50: mol_type = other RNA
gccaccccaaaaatgaaggggactaaaacagacgggtcgtttaaagccat

SEQ ID NO: 931 - RNA, 50 nt, synthetic construct
  misc_feature 1..50: note = Description of Artificial Sequence: Synthetic oligonucleotide
  source 1..50: mol_type = other RNA
gccaccccaaaaatgaaggggactaaaacatcgaacgtgggcgaaccccg

SEQ ID NO: 932 - RNA, 50 nt, synthetic construct
  misc_feature 1..50: note = Description of Artificial Sequence: Synthetic oligonucleotide
  source 1..50: mol_type = other RNA
gccaccccaaaaatgaaggggactaaaacatgggcgaaccccggccataa

SEQ ID NO: 933 - RNA, 50 nt, synthetic construct
  misc_feature 1..50: note = Description of Artificial Sequence: Synthetic oligonucleotide
  source 1..50: mol_type = other RNA
gccaccccaaaaatgaaggggactaaaacaggtcaacctcgcatattcga

SEQ ID NO: 934 - RNA, 50 nt, synthetic construct
  misc_feature 1..50: note = Description of Artificial Sequence: Synthetic oligonucleotide
  source 1..50: mol_type = other RNA
gccaccccaaaaatgaaggggactaaaacacgcatattcgaggtacaacc

SEQ ID NO: 935 - RNA, 50 nt, synthetic construct
  misc_feature 1..50: note = Description of Artificial Sequence: Synthetic oligonucleotide
  source 1..50: mol_type = other RNA
gccaccccaaaaatgaaggggactaaaacaactgtccgttcaacgcaatt

SEQ ID NO: 936 - RNA, 50 nt, synthetic construct
  misc_feature 1..50: note = Description of Artificial Sequence: Synthetic oligonucleotide
  source 1..50: mol_type = other RNA
gccaccccaaaaatgaaggggactaaaacaatcaccccaccaacaagctg

SEQ ID NO: 937 - RNA, 50 nt, synthetic construct
  misc_feature 1..50: note = Description of Artificial Sequence: Synthetic oligonucleotide
  source 1..50: mol_type = other RNA
gccaccccaaaaatgaaggggactaaaacagccatcaccccaccaacaag

SEQ ID NO: 938 - RNA, 50 nt, synthetic construct
  misc_feature 1..50: note = Description of Artificial Sequence: Synthetic oligonucleotide
  source 1..50: mol_type = other RNA
gccaccccaaaaatgaaggggactaaaacaacctagtgcccaacgtttac

SEQ ID NO: 939 - RNA, 41 nt, synthetic construct
  misc_feature 1..41: note = Description of Artificial Sequence: Synthetic oligonucleotide
  source 1..41: mol_type = other RNA
taatttctactaagtgtagatgaccggctttaagggattcg

SEQ ID NO: 940 - RNA, 41 nt, synthetic construct
  misc_feature 1..41: note = Description of Artificial Sequence: Synthetic oligonucleotide
  source 1..41: mol_type = other RNA
taatttctactaagtgtagatcgactttcatgacgtgacgg

SEQ ID NO: 941 - RNA, 41 nt, synthetic construct
  misc_feature 1..41: note = Description of Artificial Sequence: Synthetic oligonucleotide
  source 1..41: mol_type = other RNA
taatttctactaagtgtagattctgcgattactagcgactc

SEQ ID NO: 942 - RNA, 41 nt, synthetic construct
  misc_feature 1..41: note = Description of Artificial Sequence: Synthetic oligonucleotide
  source 1..41: mol_type = other RNA
taatttctactaagtgtagatcgatggacacaccatcgttg

SEQ ID NO: 943 - RNA, 41 nt, synthetic construct
  misc_feature 1..41: note = Description of Artificial Sequence: Synthetic oligonucleotide
  source 1..41: mol_type = other RNA
taatttctactaagtgtagattctccttggcgatggacaca

SEQ ID NO: 944 - RNA, 41 nt, synthetic construct
  misc_feature 1..41: note = Description of Artificial Sequence: Synthetic oligonucleotide
  source 1..41: mol_type = other RNA
taatttctactaagtgtagatcgaccttgtccatggcctcg

SEQ ID NO: 945 - RNA, 41 nt, synthetic construct
  misc_feature 1..41: note = Description of Artificial Sequence: Synthetic oligonucleotide
  source 1..41: mol_type = other RNA
taatttctactaagtgtagatcgatgaggatggagtcgacc

SEQ ID NO: 946 - RNA, 41 nt, synthetic construct
  misc_feature 1..41: note = Description of Artificial Sequence: Synthetic oligonucleotide
  source 1..41: mol_type = other RNA
taatttctactaagtgtagatgccgtggtcgacgaggtcga

SEQ ID NO: 947 - RNA, 41 nt, synthetic construct
  misc_feature 1..41: note = Description of Artificial Sequence: Synthetic oligonucleotide
  source 1..41: mol_type = other RNA
taatttctactaagtgtagatgatgtcgacctcgtagtgca

SEQ ID NO: 948 - RNA, 41 nt, synthetic construct
  misc_feature 1..41: note = Description of Artificial Sequence: Synthetic oligonucleotide
  source 1..41: mol_type = other RNA
taatttctactaagtgtagatcaggtcgacatgtgggagca

SEQ ID NO: 949 - RNA, 41 nt, synthetic construct
  misc_feature 1..41: note = Description of Artificial Sequence: Synthetic oligonucleotide
  source 1..41: mol_type = other RNA
taatttctactaagtgtagataaggtcagcagcttctggcc

SEQ ID NO: 950 - RNA, 41 nt, synthetic construct
  misc_feature 1..41: note = Description of Artificial Sequence: Synthetic oligonucleotide
  source 1..41: mol_type = other RNA
taatttctactaagtgtagatggccagaagctgctgacctt

SEQ ID NO: 951 - RNA, 41 nt, synthetic construct
  misc_feature 1..41: note = Description of Artificial Sequence: Synthetic oligonucleotide
  source 1..41: mol_type = other RNA
taatttctactaagtgtagataagcaggcaatcgcccgaat

SEQ ID NO: 952 - RNA, 41 nt, synthetic construct
  misc_feature 1..41: note = Description of Artificial Sequence: Synthetic oligonucleotide
  source 1..41: mol_type = other RNA
taatttctactaagtgtagattagtcgaacttcaggtctgg

SEQ ID NO: 953 - RNA, 41 nt, synthetic construct
  misc_feature 1..41: note = Description of Artificial Sequence: Synthetic oligonucleotide
  source 1..41: mol_type = other RNA
taatttctactaagtgtagatggggcattggtattccgttg

SEQ ID NO: 954 - RNA, 41 nt, synthetic construct
  misc_feature 1..41: note = Description of Artificial Sequence: Synthetic oligonucleotide
  source 1..41: mol_type = other RNA
taatttctactaagtgtagattcggttcaatcccgggacga

SEQ ID NO: 955 - RNA, 41 nt, synthetic construct
  misc_feature 1..41: note = Description of Artificial Sequence: Synthetic oligonucleotide
  source 1..41: mol_type = other RNA
taatttctactaagtgtagatcggtggcatagccgtttcgt

SEQ ID NO: 956 - RNA, 41 nt, synthetic construct
  misc_feature 1..41: note = Description of Artificial Sequence: Synthetic oligonucleotide
  source 1..41: mol_type = other RNA
taatttctactaagtgtagatcgaaacggctatgccaccga

SEQ ID NO: 957 - RNA, 41 nt, synthetic construct
  misc_feature 1..41: note = Description of Artificial Sequence: Synthetic oligonucleotide
  source 1..41: mol_type = other RNA
taatttctactaagtgtagatgcgaaacttattacgccggg

SEQ ID NO: 958 - RNA, 41 nt, synthetic construct
  misc_feature 1..41: note = Description of Artificial Sequence: Synthetic oligonucleotide
  source 1..41: mol_type = other RNA
taatttctactaagtgtagatgcgtaataagtttcgctggg

SEQ ID NO: 959 - RNA, 41 nt, synthetic construct
  misc_feature 1..41: note = Description of Artificial Sequence: Synthetic oligonucleotide
  source 1..41: mol_type = other RNA
taatttctactaagtgtagatcacatttaaggcgagccgac

SEQ ID NO: 960 - RNA, 41 nt, synthetic construct
  misc_feature 1..41: note = Description of Artificial Sequence: Synthetic oligonucleotide
  source 1..41: mol_type = other RNA
taatttctactaagtgtagatcgagtcgcgttacttgggag

SEQ ID NO: 961 - RNA, 41 nt, synthetic construct
  misc_feature 1..41: note = Description of Artificial Sequence: Synthetic oligonucleotide
  source 1..41: mol_type = other RNA
taatttctactaagtgtagatatggccggggttcgcccacg

SEQ ID NO: 962 - RNA, 41 nt, synthetic construct
  misc_feature 1..41: note = Description of Artificial Sequence: Synthetic oligonucleotide
  source 1..41: mol_type = other RNA
taatttctactaagtgtagatcgggcgtccgagttgtaatc

SEQ ID NO: 963 - RNA, 41 nt, synthetic construct
  misc_feature 1..41: note = Description of Artificial Sequence: Synthetic oligonucleotide
  source 1..41: mol_type = other RNA
taatttctactaagtgtagatacgccccgacgcgcccatta

SEQ ID NO: 964 - RNA, 41 nt, synthetic construct
  misc_feature 1..41: note = Description of Artificial Sequence: Synthetic oligonucleotide
  source 1..41: mol_type = other RNA
taatttctactaagtgtagatgccggactgacgcaccctat

SEQ ID NO: 965 - RNA, 41 nt, synthetic construct
  misc_feature 1..41: note = Description of Artificial Sequence: Synthetic oligonucleotide
  source 1..41: mol_type = other RNA
taatttctactaagtgtagatcaggtattgtgcgcgccgac

SEQ ID NO: 966 - RNA, 41 nt, synthetic construct
  misc_feature 1..41: note = Description of Artificial Sequence: Synthetic oligonucleotide
  source 1..41: mol_type = other RNA
taatttctactaagtgtagattgtagcatgcgtgaagccca

SEQ ID NO: 967 - RNA, 41 nt, synthetic construct
  misc_feature 1..41: note = Description of Artificial Sequence: Synthetic oligonucleotide
  source 1..41: mol_type = other RNA
taatttctactaagtgtagatgggacttaacccaacatctc

SEQ ID NO: 968 - RNA, 41 nt, synthetic construct
  misc_feature 1..41: note = Description of Artificial Sequence: Synthetic oligonucleotide
  source 1..41: mol_type = other RNA
taatttctactaagtgtagatggctgctggcacgtagttag

SEQ ID NO: 969 - RNA, 41 nt, synthetic construct
  misc_feature 1..41: note = Description of Artificial Sequence: Synthetic oligonucleotide
  source 1..41: mol_type = other RNA
taatttctactaagtgtagattgtagcacgtgtgtagccca

SEQ ID NO: 970 - RNA, 41 nt, synthetic construct
  misc_feature 1..41: note = Description of Artificial Sequence: Synthetic oligonucleotide
  source 1..41: mol_type = other RNA
taatttctactaagtgtagatctaatacaacgcaggtccat

SEQ ID NO: 971 - RNA, 41 nt, synthetic construct
  misc_feature 1..41: note = Description of Artificial Sequence: Synthetic oligonucleotide
  source 1..41: mol_type = other RNA
taatttctactaagtgtagataccaacgcatgagggagtca

SEQ ID NO: 972 - RNA, 41 nt, synthetic construct
  misc_feature 1..41: note = Description of Artificial Sequence: Synthetic oligonucleotide
  source 1..41: mol_type = other RNA
taatttctactaagtgtagatctacatgacttgaacacgcg

SEQ ID NO: 973 - RNA, 41 nt, synthetic construct
  misc_feature 1..41: note = Description of Artificial Sequence: Synthetic oligonucleotide
  source 1..41: mol_type = other RNA
taatttctactaagtgtagatttcgtagtcaggtactctat

SEQ ID NO: 974 - RNA, 41 nt, synthetic construct
  misc_feature 1..41: note = Description of Artificial Sequence: Synthetic oligonucleotide
  source 1..41: mol_type = other RNA
taatttctactaagtgtagatggcggtaacacgggttcgaa

SEQ ID NO: 975 - RNA, 41 nt, synthetic construct
  misc_feature 1..41: note = Description of Artificial Sequence: Synthetic oligonucleotide
  source 1..41: mol_type = other RNA
taatttctactaagtgtagatggggttaagacaccgccttt

SEQ ID NO: 976 - RNA, 41 nt, synthetic construct
  misc_feature 1..41: note = Description of Artificial Sequence: Synthetic oligonucleotide
  source 1..41: mol_type = other RNA
taatttctactaagtgtagattggtcaaggggttaagacac

SEQ ID NO: 977 - RNA, 50 nt, synthetic construct
  misc_feature 1..50: note = Description of Artificial Sequence: Synthetic oligonucleotide
  source 1..50: mol_type = other RNA
gccaccccaaaaatgaaggggactaaaacaggcgcaatgtgcgttcaaag

SEQ ID NO: 978 - RNA, 50 nt, synthetic construct
  misc_feature 1..50: note = Description of Artificial Sequence: Synthetic oligonucleotide
  source 1..50: mol_type = other RNA
gccaccccaaaaatgaaggggactaaaacacgctgcgttcttcatcgatg

SEQ ID NO: 979 - RNA, 50 nt, synthetic construct
  misc_feature 1..50: note = Description of Artificial Sequence: Synthetic oligonucleotide
  source 1..50: mol_type = other RNA
gccaccccaaaaatgaaggggactaaaacaggcagcaatgacgctcggac

SEQ ID NO: 980 - RNA, 50 nt, synthetic construct
  misc_feature 1..50: note = Description of Artificial Sequence: Synthetic oligonucleotide
  source 1..50: mol_type = other RNA
gccaccccaaaaatgaaggggactaaaacagaagcgcgttcctcggtcca

SEQ ID NO: 981 - RNA, 50 nt, synthetic construct
  misc_feature 1..50: note = Description of Artificial Sequence: Synthetic oligonucleotide
  source 1..50: mol_type = other RNA
gccaccccaaaaatgaaggggactaaaacaaagcgcgttcctcggtccag

SEQ ID NO: 982 - RNA, 50 nt, synthetic construct
  misc_feature 1..50: note = Description of Artificial Sequence: Synthetic oligonucleotide
  source 1..50: mol_type = other RNA
gccaccccaaaaatgaaggggactaaaacaagcgcgttcctcggtccagg

SEQ ID NO: 983 - RNA, 50 nt, synthetic construct
  misc_feature 1..50: note = Description of Artificial Sequence: Synthetic oligonucleotide
  source 1..50: mol_type = other RNA
gccaccccaaaaatgaaggggactaaaacaatccattgttgaaagtttta

SEQ ID NO: 984 - RNA, 50 nt, synthetic construct
  misc_feature 1..50: note = Description of Artificial Sequence: Synthetic oligonucleotide
  source 1..50: mol_type = other RNA
gccaccccaaaaatgaaggggactaaaacagagatccattgttgaaagtt

SEQ ID NO: 985 - RNA, 50 nt, synthetic construct
  misc_feature 1..50: note = Description of Artificial Sequence: Synthetic oligonucleotide
  source 1..50: mol_type = other RNA
gccaccccaaaaatgaaggggactaaaacaaccaagagatccattgttga

SEQ ID NO: 986 - RNA, 50 nt, synthetic construct
  misc_feature 1..50: note = Description of Artificial Sequence: Synthetic oligonucleotide
  source 1..50: mol_type = other RNA
gccaccccaaaaatgaaggggactaaaacacttcatcgatgcgagaacca

SEQ ID NO: 987 - RNA, 50 nt, synthetic construct
  misc_feature 1..50: note = Description of Artificial Sequence: Synthetic oligonucleotide
  source 1..50: mol_type = other RNA
gccaccccaaaaatgaaggggactaaaacagacgctcaaacaggcatgcc

SEQ ID NO: 988 - RNA, 50 nt, synthetic construct
  misc_feature 1..50: note = Description of Artificial Sequence: Synthetic oligonucleotide
  source 1..50: mol_type = other RNA
gccaccccaaaaatgaaggggactaaaacacatcgatgcgagaaccaaga

SEQ ID NO: 989 - RNA, 50 nt, synthetic construct
  misc_feature 1..50: note = Description of Artificial Sequence: Synthetic oligonucleotide
  source 1..50: mol_type = other RNA
gccaccccaaaaatgaaggggactaaaacatgttcgctatcggtctctcg

SEQ ID NO: 990 - RNA, 50 nt, synthetic construct
  misc_feature 1..50: note = Description of Artificial Sequence: Synthetic oligonucleotide
  source 1..50: mol_type = other RNA
gccaccccaaaaatgaaggggactaaaacaccctttcaacaatttcacgt

SEQ ID NO: 991 - RNA, 50 nt, synthetic construct
  misc_feature 1..50: note = Description of Artificial Sequence: Synthetic oligonucleotide
  source 1..50: mol_type = other RNA
gccaccccaaaaatgaaggggactaaaacacattcccaaacaactcgact

SEQ ID NO: 992 - RNA, 50 nt, synthetic construct
  misc_feature 1..50: note = Description of Artificial Sequence: Synthetic oligonucleotide
  source 1..50: mol_type = other RNA
gccaccccaaaaatgaaggggactaaaacatgagtgattagtgcgaaata

SEQ ID NO: 993 - RNA, 50 nt, synthetic construct
  misc_feature 1..50: note = Description of Artificial Sequence: Synthetic oligonucleotide
  source 1..50: mol_type = other RNA
gccaccccaaaaatgaaggggactaaaacagacgacaacaatgtaacgcc

SEQ ID NO: 994 - RNA, 50 nt, synthetic construct
  misc_feature 1..50: note = Description of Artificial Sequence: Synthetic oligonucleotide
  source 1..50: mol_type = other RNA
gccaccccaaaaatgaaggggactaaaacaatgggtaccgaatccatgtc

SEQ ID NO: 995 - RNA, 50 nt, synthetic construct
  misc_feature 1..50: note = Description of Artificial Sequence: Synthetic oligonucleotide
  source 1..50: mol_type = other RNA
gccaccccaaaaatgaaggggactaaaacacacgtctccaataatgaggt

SEQ ID NO: 996 - RNA, 50 nt, synthetic construct
  misc_feature 1..50: note = Description of Artificial Sequence: Synthetic oligonucleotide
  source 1..50: mol_type = other RNA
gccaccccaaaaatgaaggggactaaaacagcatcacgtctccaataatg

SEQ ID NO: 997 - RNA, 50 nt, synthetic construct
  misc_feature 1..50: note = Description of Artificial Sequence: Synthetic oligonucleotide
  source 1..50: mol_type = other RNA
gccaccccaaaaatgaaggggactaaaacaaattgagcaaatgaacggtc

SEQ ID NO: 998 - RNA, 50 nt, synthetic construct
  misc_feature 1..50: note = Description of Artificial Sequence: Synthetic oligonucleotide
  source 1..50: mol_type = other RNA
gccaccccaaaaatgaaggggactaaaacacgcgttcaaaaccaagtcgt

SEQ ID NO: 999 - RNA, 50 nt, synthetic construct
  misc_feature 1..50: note = Description of Artificial Sequence: Synthetic oligonucleotide
  source 1..50: mol_type = other RNA
gccaccccaaaaatgaaggggactaaaacatcgttaatgcactcgacacc

SEQ ID NO: 1000 - RNA, 50 nt, synthetic construct
  misc_feature 1..50: note = Description of Artificial Sequence: Synthetic oligonucleotide
  source 1..50: mol_type = other RNA
gccaccccaaaaatgaaggggactaaaacagacatggtttaacgcgttca

SEQ ID NO: 1001 - RNA, 50 nt, synthetic construct
  misc_feature 1..50: note = Description of Artificial Sequence: Synthetic oligonucleotide
  source 1..50: mol_type = other RNA
gccaccccaaaaatgaaggggactaaaacagataattcggcttcgggcgt

SEQ ID NO: 1002 - RNA, 50 nt, synthetic construct
  misc_feature 1..50: note = Description of Artificial Sequence: Synthetic oligonucleotide
  source 1..50: mol_type = other RNA
gccaccccaaaaatgaaggggactaaaacatcgggcgtttccaactcccg

SEQ ID NO: 1003 - RNA, 50 nt, synthetic construct
  misc_feature 1..50: note = Description of Artificial Sequence: Synthetic oligonucleotide
  source 1..50: mol_type = other RNA
gccaccccaaaaatgaaggggactaaaacatagataattcggcttcgggc

SEQ ID NO: 1004 - RNA, 50 nt, synthetic construct
  misc_feature 1..50: note = Description of Artificial Sequence: Synthetic oligonucleotide
  source 1..50: mol_type = other RNA
gccaccccaaaaatgaaggggactaaaacaatcgctgaccctaccttcgg

SEQ ID NO: 1005 - RNA, 50 nt, synthetic construct
  misc_feature 1..50: note = Description of Artificial Sequence: Synthetic oligonucleotide
  source 1..50: mol_type = other RNA
gccaccccaaaaatgaaggggactaaaacacggacttcgggtattgccaa

SEQ ID NO: 1006 - RNA, 50 nt, synthetic construct
  misc_feature 1..50: note = Description of Artificial Sequence: Synthetic oligonucleotide
  source 1..50: mol_type = other RNA
gccaccccaaaaatgaaggggactaaaacacttgcggttagctcacggac

SEQ ID NO: 1007 - RNA, 50 nt, synthetic construct
  misc_feature 1..50: note = Description of Artificial Sequence: Synthetic oligonucleotide
  source 1..50: mol_type = other RNA
gccaccccaaaaatgaaggggactaaaacattaaccccaccttcggccgc

SEQ ID NO: 1008 - RNA, 50 nt, synthetic construct
  misc_feature 1..50: note = Description of Artificial Sequence: Synthetic oligonucleotide
  source 1..50: mol_type = other RNA
gccaccccaaaaatgaaggggactaaaacatagcaactccggcttcatgc

SEQ ID NO: 1009 - RNA, 50 nt, synthetic construct
  misc_feature 1..50: note = Description of Artificial Sequence: Synthetic oligonucleotide
  source 1..50: mol_type = other RNA
gccaccccaaaaatgaaggggactaaaacacggacttcgggtgttgccaa

SEQ ID NO: 1010 - RNA, 50 nt, synthetic construct
  misc_feature 1..50: note = Description of Artificial Sequence: Synthetic oligonucleotide
  source 1..50: mol_type = other RNA
gccaccccaaaaatgaaggggactaaaacactcgcggtattgcgtctcat

SEQ ID NO: 1011 - RNA, 50 nt, synthetic construct
  misc_feature 1..50: note = Description of Artificial Sequence: Synthetic oligonucleotide
  source 1..50: mol_type = other RNA
gccaccccaaaaatgaaggggactaaaacacaatccgaactgggacatat

SEQ ID NO: 1012 - RNA, 50 nt, synthetic construct
  misc_feature 1..50: note = Description of Artificial Sequence: Synthetic oligonucleotide
  source 1..50: mol_type = other RNA
gccaccccaaaaatgaaggggactaaaacaatagatttgctccacctcgc

SEQ ID NO: 1013 - RNA, 50 nt, synthetic construct
  misc_feature 1..50: note = Description of Artificial Sequence: Synthetic oligonucleotide
  source 1..50: mol_type = other RNA
gccaccccaaaaatgaaggggactaaaacaccaaacttagctacgctgcg

SEQ ID NO: 1014 - RNA, 50 nt, synthetic construct
  misc_feature 1..50: note = Description of Artificial Sequence: Synthetic oligonucleotide
  source 1..50: mol_type = other RNA
gccaccccaaaaatgaaggggactaaaacagtggtttgttcaacccggtc

SEQ ID NO: 1015 - RNA, 50 nt, synthetic construct
  misc_feature 1..50: note = Description of Artificial Sequence: Synthetic oligonucleotide
  source 1..50: mol_type = other RNA
gccaccccaaaaatgaaggggactaaaacattagctacgctgcgatgctc

SEQ ID NO: 1016 - RNA, 50 nt, synthetic construct
  misc_feature 1..50: note = Description of Artificial Sequence: Synthetic oligonucleotide
  source 1..50: mol_type = other RNA
gccaccccaaaaatgaaggggactaaaacagataagaagaatccgcacaa

SEQ ID NO: 1017 - RNA, 50 nt, synthetic construct
  misc_feature 1..50: note = Description of Artificial Sequence: Synthetic oligonucleotide
  source 1..50: mol_type = other RNA
gccaccccaaaaatgaaggggactaaaacaataggataagaagaatccgc

SEQ ID NO: 1018 - RNA, 50 nt, synthetic construct
  misc_feature 1..50: note = Description of Artificial Sequence: Synthetic oligonucleotide
  source 1..50: mol_type = other RNA
gccaccccaaaaatgaaggggactaaaacataggataagaagaatccgca

SEQ ID NO: 1019 - RNA, 50 nt, synthetic construct
  misc_feature 1..50: note = Description of Artificial Sequence: Synthetic oligonucleotide
  source 1..50: mol_type = other RNA
gccaccccaaaaatgaaggggactaaaacacggctttcagcgattcgctc

SEQ ID NO: 1020 - RNA, 50 nt, synthetic construct
  misc_feature 1..50: note = Description of Artificial Sequence: Synthetic oligonucleotide
  source 1..50: mol_type = other RNA
gccaccccaaaaatgaaggggactaaaacagcgttgtaccgaccattgta

SEQ ID NO: 1021 - RNA, 50 nt, synthetic construct
  misc_feature 1..50: note = Description of Artificial Sequence: Synthetic oligonucleotide
  source 1..50: mol_type = other RNA
gccaccccaaaaatgaaggggactaaaacaggccggctttcagcgattcg

SEQ ID NO: 1022 - RNA, 50 nt, synthetic construct
  misc_feature 1..50: note = Description of Artificial Sequence: Synthetic oligonucleotide
  source 1..50: mol_type = other RNA
gccaccccaaaaatgaaggggactaaaacaggacgctcggtggacttatc

SEQ ID NO: 1023 - RNA, 50 nt, synthetic construct
  misc_feature 1..50: note = Description of Artificial Sequence: Synthetic oligonucleotide
  source 1..50: mol_type = other RNA
gccaccccaaaaatgaaggggactaaaacatgagaagcgtgaacgtctcg

SEQ ID NO: 1024 - RNA, 50 nt, synthetic construct
  misc_feature 1..50: note = Description of Artificial Sequence: Synthetic oligonucleotide
  source 1..50: mol_type = other RNA
gccaccccaaaaatgaaggggactaaaacatggccgatgttcatacgacg

SEQ ID NO: 1025 - RNA, 50 nt, synthetic construct
  misc_feature 1..50: note = Description of Artificial Sequence: Synthetic oligonucleotide
  source 1..50: mol_type = other RNA
gccaccccaaaaatgaaggggactaaaacatacatcgcatcttggccacg

SEQ ID NO: 1026 - RNA, 50 nt, synthetic construct
  misc_feature 1..50: note = Description of Artificial Sequence: Synthetic oligonucleotide
  source 1..50: mol_type = other RNA
gccaccccaaaaatgaaggggactaaaacagagcactacacgcgaagcac

SEQ ID NO: 1027 - RNA, 50 nt, synthetic construct
  misc_feature 1..50: note = Description of Artificial Sequence: Synthetic oligonucleotide
  source 1..50: mol_type = other RNA
gccaccccaaaaatgaaggggactaaaacacgaagcaccatcaccgaacc

SEQ ID NO: 1028 - RNA, 50 nt, synthetic construct
  misc_feature 1..50: note = Description of Artificial Sequence: Synthetic oligonucleotide
  source 1..50: mol_type = other RNA
gccaccccaaaaatgaaggggactaaaacagtgcattgattagttcgccg

SEQ ID NO: 1029 - RNA, 50 nt, synthetic construct
  misc_feature 1..50: note = Description of Artificial Sequence: Synthetic oligonucleotide
  source 1..50: mol_type = other RNA
gccaccccaaaaatgaaggggactaaaacaatcgcttccaaaccggccgt

SEQ ID NO: 1030 - RNA, 50 nt, synthetic construct
  misc_feature 1..50: note = Description of Artificial Sequence: Synthetic oligonucleotide
  source 1..50: mol_type = other RNA
gccaccccaaaaatgaaggggactaaaacaacggccggtttggaagcgat

SEQ ID NO: 1031 - RNA, 50 nt, synthetic construct
  misc_feature 1..50: note = Description of Artificial Sequence: Synthetic oligonucleotide
  source 1..50: mol_type = other RNA
gccaccccaaaaatgaaggggactaaaacaactttatgtgagtcgccgcg

SEQ ID NO: 1032 - RNA, 50 nt, synthetic construct
  misc_feature 1..50: note = Description of Artificial Sequence: Synthetic oligonucleotide
  source 1..50: mol_type = other RNA
gccaccccaaaaatgaaggggactaaaacaattagtgagtgtaaggcgag

SEQ ID NO: 1033 - RNA, 50 nt, synthetic construct
  misc_feature 1..50: note = Description of Artificial Sequence: Synthetic oligonucleotide
  source 1..50: mol_type = other RNA
gccaccccaaaaatgaaggggactaaaacacgaccgacagcgcccctcac

SEQ ID NO: 1034 - RNA, 50 nt, synthetic construct
  misc_feature 1..50: note = Description of Artificial Sequence: Synthetic oligonucleotide
  source 1..50: mol_type = other RNA
gccaccccaaaaatgaaggggactaaaacacgagcttcgctggacttacg

SEQ ID NO: 1035 - RNA, 50 nt, synthetic construct
  misc_feature 1..50: note = Description of Artificial Sequence: Synthetic oligonucleotide
  source 1..50: mol_type = other RNA
gccaccccaaaaatgaaggggactaaaacaaagatcattaactcgcgcgt

SEQ ID NO: 1036 - RNA, 50 nt, synthetic construct
  misc_feature 1..50: note = Description of Artificial Sequence: Synthetic oligonucleotide
  source 1..50: mol_type = other RNA
gccaccccaaaaatgaaggggactaaaacaattaactcgcgcgtcctgac

SEQ ID NO: 1037 - RNA, 50 nt, synthetic construct
  misc_feature 1..50: note = Description of Artificial Sequence: Synthetic oligonucleotide
  source 1..50: mol_type = other RNA
gccaccccaaaaatgaaggggactaaaacatcgcaactacgcgaagcaac

SEQ ID NO: 1038 - RNA, 50 nt, synthetic construct
  misc_feature 1..50: note = Description of Artificial Sequence: Synthetic oligonucleotide
  source 1..50: mol_type = other RNA
gccaccccaaaaatgaaggggactaaaacaccaccgcatcgcaactacgc

SEQ ID NO: 1039 - RNA, 50 nt, synthetic construct
  misc_feature 1..50: note = Description of Artificial Sequence: Synthetic oligonucleotide
  source 1..50: mol_type = other RNA
gccaccccaaaaatgaaggggactaaaacagttgtccggaatgtgacccg

SEQ ID NO: 1040 - RNA, 50 nt, synthetic construct
  misc_feature 1..50: note = Description of Artificial Sequence: Synthetic oligonucleotide
  source 1..50: mol_type = other RNA
gccaccccaaaaatgaaggggactaaaacaaccgttcgcaccacgcttat

SEQ ID NO: 1041 - RNA, 50 nt, synthetic construct
  misc_feature 1..50: note = Description of Artificial Sequence: Synthetic oligonucleotide
  source 1..50: mol_type = other RNA
gccaccccaaaaatgaaggggactaaaacacttatcgacgaccaactcat

SEQ ID NO: 1042 - RNA, 50 nt, synthetic construct
  misc_feature 1..50: note = Description of Artificial Sequence: Synthetic oligonucleotide
  source 1..50: mol_type = other RNA
gccaccccaaaaatgaaggggactaaaacattgtcgcggtactccacgat

SEQ ID NO: 1043 - RNA, 50 nt, synthetic construct
  misc_feature 1..50: note = Description of Artificial Sequence: Synthetic oligonucleotide
  source 1..50: mol_type = other RNA
gccaccccaaaaatgaaggggactaaaacaacgtgaagcgcggtttgcga

SEQ ID NO: 1044 - RNA, 50 nt, synthetic construct
  misc_feature 1..50: note = Description of Artificial Sequence: Synthetic oligonucleotide
  source 1..50: mol_type = other RNA
gccaccccaaaaatgaaggggactaaaacacgaaacggcgttgcccctta

SEQ ID NO: 1045 - RNA, 50 nt, synthetic construct
  misc_feature 1..50: note = Description of Artificial Sequence: Synthetic oligonucleotide
  source 1..50: mol_type = other RNA
gccaccccaaaaatgaaggggactaaaacaaacgacgtgaagcgcggttt

SEQ ID NO: 1046 - RNA, 50 nt, synthetic construct
  misc_feature 1..50: note = Description of Artificial Sequence: Synthetic oligonucleotide
  source 1..50: mol_type = other RNA
gccaccccaaaaatgaaggggactaaaacaatcgcgttgtcatacgagtc

SEQ ID NO: 1047 - RNA, 50 nt, synthetic construct
  misc_feature 1..50: note = Description of Artificial Sequence: Synthetic oligonucleotide
  source 1..50: mol_type = other RNA
gccaccccaaaaatgaaggggactaaaacaccagcaatcgtcgattgtta

SEQ ID NO: 1048 - RNA, 50 nt, synthetic construct
  misc_feature 1..50: note = Description of Artificial Sequence: Synthetic oligonucleotide
  source 1..50: mol_type = other RNA
gccaccccaaaaatgaaggggactaaaacagctcttacggtgtattacct

SEQ ID NO: 1049 - RNA, 50 nt, synthetic construct
  misc_feature 1..50: note = Description of Artificial Sequence: Synthetic oligonucleotide
  source 1..50: mol_type = other RNA
gccaccccaaaaatgaaggggactaaaacacgggttaacccaatcggctt

SEQ ID NO: 1050 - RNA, 50 nt, synthetic construct
  misc_feature 1..50: note = Description of Artificial Sequence: Synthetic oligonucleotide
  source 1..50: mol_type = other RNA
gccaccccaaaaatgaaggggactaaaacaatagcccgtcatttctgcgc

SEQ ID NO: 1051 - RNA, 50 nt, synthetic construct
  misc_feature 1..50: note = Description of Artificial Sequence: Synthetic oligonucleotide
  source 1..50: mol_type = other RNA
gccaccccaaaaatgaaggggactaaaacagttggttacgtatcgtttaa

SEQ ID NO: 1052 - RNA, 50 nt, synthetic construct
  misc_feature 1..50: note = Description of Artificial Sequence: Synthetic oligonucleotide
  source 1..50: mol_type = other RNA
gccaccccaaaaatgaaggggactaaaacagcttcgcgaccctttgtact

SEQ ID NO: 1053 - RNA, 50 nt, synthetic construct
  misc_feature 1..50: note = Description of Artificial Sequence: Synthetic oligonucleotide
  source 1..50: mol_type = other RNA
gccaccccaaaaatgaaggggactaaaacacacctcgcggcttcgcgacc

SEQ ID NO: 1054 - RNA, 50 nt, synthetic construct
  misc_feature 1..50: note = Description of Artificial Sequence: Synthetic oligonucleotide
  source 1..50: mol_type = other RNA
gccaccccaaaaatgaaggggactaaaacaataaaggtgaccctaccgac

SEQ ID NO: 1055 - RNA, 50 nt, synthetic construct
  misc_feature 1..50: note = Description of Artificial Sequence: Synthetic oligonucleotide
  source 1..50: mol_type = other RNA
gccaccccaaaaatgaaggggactaaaacacagcgatgctcctggcggaa

SEQ ID NO: 1056 - RNA, 50 nt, synthetic construct
  misc_feature 1..50: note = Description of Artificial Sequence: Synthetic oligonucleotide
  source 1..50: mol_type = other RNA
gccaccccaaaaatgaaggggactaaaacaagggatcttactttccgaag

SEQ ID NO: 1057 - RNA, 50 nt, synthetic construct
  misc_feature 1..50: note = Description of Artificial Sequence: Synthetic oligonucleotide
  source 1..50: mol_type = other RNA
gccaccccaaaaatgaaggggactaaaacatagctacccagcgatgctcc

SEQ ID NO: 1058 - RNA, 50 nt, synthetic construct
  misc_feature 1..50: note = Description of Artificial Sequence: Synthetic oligonucleotide
  source 1..50: mol_type = other RNA
gccaccccaaaaatgaaggggactaaaacattcgtaaacgtacgtaacgg

SEQ ID NO: 1059 - RNA, 50 nt, synthetic construct
  misc_feature 1..50: note = Description of Artificial Sequence: Synthetic oligonucleotide
  source 1..50: mol_type = other RNA
gccaccccaaaaatgaaggggactaaaacacgtacgtaacggtttgttta

SEQ ID NO: 1060 - RNA, 50 nt, synthetic construct
  misc_feature 1..50: note = Description of Artificial Sequence: Synthetic oligonucleotide
  source 1..50: mol_type = other RNA
gccaccccaaaaatgaaggggactaaaacaatctaccggatctaccggat

SEQ ID NO: 1061 - RNA, 50 nt, synthetic construct
  misc_feature 1..50: note = Description of Artificial Sequence: Synthetic oligonucleotide
  source 1..50: mol_type = other RNA
gccaccccaaaaatgaaggggactaaaacacgacaaaccactacgagctc

SEQ ID NO: 1062 - RNA, 50 nt, synthetic construct
  misc_feature 1..50: note = Description of Artificial Sequence: Synthetic oligonucleotide
  source 1..50: mol_type = other RNA
gccaccccaaaaatgaaggggactaaaacaacaacgcgacaaaccactac

SEQ ID NO: 1063 - RNA, 50 nt, synthetic construct
  misc_feature 1..50: note = Description of Artificial Sequence: Synthetic oligonucleotide
  source 1..50: mol_type = other RNA
gccaccccaaaaatgaaggggactaaaacaaccactacgagctctttacg

SEQ ID NO: 1064 - RNA, 50 nt, synthetic construct
  misc_feature 1..50: note = Description of Artificial Sequence: Synthetic oligonucleotide
  source 1..50: mol_type = other RNA
gccaccccaaaaatgaaggggactaaaacagtaagcgggctccttgcggt

SEQ ID NO: 1065 - RNA, 50 nt, synthetic construct
  misc_feature 1..50: note = Description of Artificial Sequence: Synthetic oligonucleotide
  source 1..50: mol_type = other RNA
gccaccccaaaaatgaaggggactaaaacaccgtggtaagcgggctcctt

SEQ ID NO: 1066 - RNA, 50 nt, synthetic construct
  misc_feature 1..50: note = Description of Artificial Sequence: Synthetic oligonucleotide
  source 1..50: mol_type = other RNA
gccaccccaaaaatgaaggggactaaaacacgggctccttgcggttaccc

SEQ ID NO: 1067 - RNA, 50 nt, synthetic construct
  misc_feature 1..50: note = Description of Artificial Sequence: Synthetic oligonucleotide
  source 1..50: mol_type = other RNA
gccaccccaaaaatgaaggggactaaaacacgaacgactctttagtgcgg

SEQ ID NO: 1068 - RNA, 50 nt, synthetic construct
  misc_feature 1..50: note = Description of Artificial Sequence: Synthetic oligonucleotide
  source 1..50: mol_type = other RNA
gccaccccaaaaatgaaggggactaaaacatagtgcggttaaaccgcaag

SEQ ID NO: 1069 - RNA, 50 nt, synthetic construct
  misc_feature 1..50: note = Description of Artificial Sequence: Synthetic oligonucleotide
  source 1..50: mol_type = other RNA
gccaccccaaaaatgaaggggactaaaacacggctatgcaactggcgtta

SEQ ID NO: 1070 - RNA, 50 nt, synthetic construct
  misc_feature 1..50: note = Description of Artificial Sequence: Synthetic oligonucleotide
  source 1..50: mol_type = other RNA
gccaccccaaaaatgaaggggactaaaacatcgcctgcgccagaacggag

SEQ ID NO: 1071 - RNA, 50 nt, synthetic construct
  misc_feature 1..50: note = Description of Artificial Sequence: Synthetic oligonucleotide
  source 1..50: mol_type = other RNA
gccaccccaaaaatgaaggggactaaaacagttttgcggaacctggttcg

SEQ ID NO: 1072 - RNA, 50 nt, synthetic construct
  misc_feature 1..50: note = Description of Artificial Sequence: Synthetic oligonucleotide
  source 1..50: mol_type = other RNA
gccaccccaaaaatgaaggggactaaaacaaccgcacccaagtcagaacg

SEQ ID NO: 1073 - RNA, 50 nt, synthetic construct
  misc_feature 1..50: note = Description of Artificial Sequence: Synthetic oligonucleotide
  source 1..50: mol_type = other RNA
gccaccccaaaaatgaaggggactaaaacacgggatcgataattgctcac

SEQ ID NO: 1074 - RNA, 50 nt, synthetic construct
  misc_feature 1..50: note = Description of Artificial Sequence: Synthetic oligonucleotide
  source 1..50: mol_type = other RNA
gccaccccaaaaatgaaggggactaaaacaccggatacgggatcgataat

SEQ ID NO: 1075 - RNA, 50 nt, synthetic construct
  misc_feature 1..50: note = Description of Artificial Sequence: Synthetic oligonucleotide
  source 1..50: mol_type = other RNA
gccaccccaaaaatgaaggggactaaaacaagtcctgtatcttcgccgta

SEQ ID NO: 1076 - RNA, 50 nt, synthetic construct
  misc_feature 1..50: note = Description of Artificial Sequence: Synthetic oligonucleotide
  source 1..50: mol_type = other RNA
gccaccccaaaaatgaaggggactaaaacagcgcccccccgaaggttaag

SEQ ID NO: 1077 - RNA, 50 nt, synthetic construct
  misc_feature 1..50: note = Description of Artificial Sequence: Synthetic oligonucleotide
  source 1..50: mol_type = other RNA
gccaccccaaaaatgaaggggactaaaacaccccgaaggttaagctacct

SEQ ID NO: 1078 - RNA, 50 nt, synthetic construct
  misc_feature 1..50: note = Description of Artificial Sequence: Synthetic oligonucleotide
  source 1..50: mol_type = other RNA
gccaccccaaaaatgaaggggactaaaacacacaaagtggtaagcgcccc

SEQ ID NO: 1079 - RNA, 50 nt, synthetic construct
  misc_feature 1..50: note = Description of Artificial Sequence: Synthetic oligonucleotide
  source 1..50: mol_type = other RNA
gccaccccaaaaatgaaggggactaaaacatgatgagcgacattaccgta

SEQ ID NO: 1080 - RNA, 50 nt, synthetic construct
  misc_feature 1..50: note = Description of Artificial Sequence: Synthetic oligonucleotide
  source 1..50: mol_type = other RNA
gccaccccaaaaatgaaggggactaaaacagaacaatgttgatgagcgac

SEQ ID NO: 1081 - RNA, 50 nt, synthetic construct
  misc_feature 1..50: note = Description of Artificial Sequence: Synthetic oligonucleotide
  source 1..50: mol_type = other RNA
gccaccccaaaaatgaaggggactaaaacacgttctgtgctggacatacg

SEQ ID NO: 1082 - RNA, 50 nt, synthetic construct
  misc_feature 1..50: note = Description of Artificial Sequence: Synthetic oligonucleotide
  source 1..50: mol_type = other RNA
gccaccccaaaaatgaaggggactaaaacaacgtatctgatcccagaatg

SEQ ID NO: 1083 - RNA, 50 nt, synthetic construct
  misc_feature 1..50: note = Description of Artificial Sequence: Synthetic oligonucleotide
  source 1..50: mol_type = other RNA
gccaccccaaaaatgaaggggactaaaacatcgcctgatatttacgtatc

SEQ ID NO: 1084 - RNA, 50 nt, synthetic construct
  misc_feature 1..50: note = Description of Artificial Sequence: Synthetic oligonucleotide
  source 1..50: mol_type = other RNA
gccaccccaaaaatgaaggggactaaaacatctgatcccagaatgcccgg

SEQ ID NO: 1085 - RNA, 50 nt, synthetic construct
  misc_feature 1..50: note = Description of Artificial Sequence: Synthetic oligonucleotide
  source 1..50: mol_type = other RNA
gccaccccaaaaatgaaggggactaaaacacgacagactttatgtggtcc

SEQ ID NO: 1086 - RNA, 50 nt, synthetic construct
  misc_feature 1..50: note = Description of Artificial Sequence: Synthetic oligonucleotide
  source 1..50: mol_type = other RNA
gccaccccaaaaatgaaggggactaaaacagactacgacagactttatgt

SEQ ID NO: 1087 - RNA, 50 nt, synthetic construct
  misc_feature 1..50: note = Description of Artificial Sequence: Synthetic oligonucleotide
  source 1..50: mol_type = other RNA
gccaccccaaaaatgaaggggactaaaacaagactttatgtggtccgctt

SEQ ID NO: 1088 - RNA, 50 nt, synthetic construct
  misc_feature 1..50: note = Description of Artificial Sequence: Synthetic oligonucleotide
  source 1..50: mol_type = other RNA
gccaccccaaaaatgaaggggactaaaacatcagggggctttaagcccca

SEQ ID NO: 1089 - RNA, 50 nt, synthetic construct
  misc_feature 1..50: note = Description of Artificial Sequence: Synthetic oligonucleotide
  source 1..50: mol_type = other RNA
gccaccccaaaaatgaaggggactaaaacagggctttaagccccagggaa

SEQ ID NO: 1090 - RNA, 50 nt, synthetic construct
  misc_feature 1..50: note = Description of Artificial Sequence: Synthetic oligonucleotide
  source 1..50: mol_type = other RNA
gccaccccaaaaatgaaggggactaaaacattaacgttccttcagggggc

SEQ ID NO: 1091 - RNA, 50 nt, synthetic construct
  misc_feature 1..50: note = Description of Artificial Sequence: Synthetic oligonucleotide
  source 1..50: mol_type = other RNA
gccaccccaaaaatgaaggggactaaaacacgaggcaagtttcctgctta

SEQ ID NO: 1092 - RNA, 50 nt, synthetic construct
  misc_feature 1..50: note = Description of Artificial Sequence: Synthetic oligonucleotide
  source 1..50: mol_type = other RNA
gccaccccaaaaatgaaggggactaaaacacatctcgaggcaagtttcct

SEQ ID NO: 1093 - RNA, 50 nt, synthetic construct
  misc_feature 1..50: note = Description of Artificial Sequence: Synthetic oligonucleotide
  source 1..50: mol_type = other RNA
gccaccccaaaaatgaaggggactaaaacactgcttagatgctttcagcg

SEQ ID NO: 1094 - RNA, 50 nt, synthetic construct
  misc_feature 1..50: note = Description of Artificial Sequence: Synthetic oligonucleotide
  source 1..50: mol_type = other RNA
gccaccccaaaaatgaaggggactaaaacaacgacgtactttgtgagatt

SEQ ID NO: 1095 - RNA, 50 nt, synthetic construct
  misc_feature 1..50: note = Description of Artificial Sequence: Synthetic oligonucleotide
  source 1..50: mol_type = other RNA
gccaccccaaaaatgaaggggactaaaacacgcaacattctgatttgcga

SEQ ID NO: 1096 - RNA, 50 nt, synthetic construct
  misc_feature 1..50: note = Description of Artificial Sequence: Synthetic oligonucleotide
  source 1..50: mol_type = other RNA
gccaccccaaaaatgaaggggactaaaacaaccacaaagtggcaagcgtc

SEQ ID NO: 1097 - RNA, 50 nt, synthetic construct
  misc_feature 1..50: note = Description of Artificial Sequence: Synthetic oligonucleotide
  source 1..50: mol_type = other RNA
gccaccccaaaaatgaaggggactaaaacaacgctacgcgttgacagtcc

SEQ ID NO: 1098 - RNA, 50 nt, synthetic construct
  misc_feature 1..50: note = Description of Artificial Sequence: Synthetic oligonucleotide
  source 1..50: mol_type = other RNA
gccaccccaaaaatgaaggggactaaaacagccgcgcgttgacagtccct

SEQ ID NO: 1099 - RNA, 50 nt, synthetic construct
  misc_feature 1..50: note = Description of Artificial Sequence: Synthetic oligonucleotide
  source 1..50: mol_type = other RNA
gccaccccaaaaatgaaggggactaaaacacacataacgcccgcctaagg

SEQ ID NO: 1100 - RNA, 50 nt, synthetic construct
  misc_feature 1..50: note = Description of Artificial Sequence: Synthetic oligonucleotide
  source 1..50: mol_type = other RNA
gccaccccaaaaatgaaggggactaaaacagtaagcgtccccccgaaggt

SEQ ID NO: 1101 - RNA, 50 nt, synthetic construct
  misc_feature 1..50: note = Description of Artificial Sequence: Synthetic oligonucleotide
  source 1..50: mol_type = other RNA
gccaccccaaaaatgaaggggactaaaacaccccgaaggttaaactacct

SEQ ID NO: 1102 - RNA, 50 nt, synthetic construct
  misc_feature 1..50: note = Description of Artificial Sequence: Synthetic oligonucleotide
  source 1..50: mol_type = other RNA
gccaccccaaaaatgaaggggactaaaacacacaaagtggtaagcgtccc

SEQ ID NO: 1103 - RNA, 50 nt, synthetic construct
  misc_feature 1..50: note = Description of Artificial Sequence: Synthetic oligonucleotide
  source 1..50: mol_type = other RNA
gccaccccaaaaatgaaggggactaaaacaaccacaaagtggtgagcgtc

SEQ ID NO: 1104 - RNA, 50 nt, synthetic construct
  misc_feature 1..50: note = Description of Artificial Sequence: Synthetic oligonucleotide
  source 1..50: mol_type = other RNA
gccaccccaaaaatgaaggggactaaaacaagcgccaggttcccctagcg

SEQ ID NO: 1105 - RNA, 50 nt, synthetic construct
  misc_feature 1..50: note = Description of Artificial Sequence: Synthetic oligonucleotide
  source 1..50: mol_type = other RNA
gccaccccaaaaatgaaggggactaaaacaccaggttcccctagcgctac

SEQ ID NO: 1106 - RNA, 50 nt, synthetic construct
  misc_feature 1..50: note = Description of Artificial Sequence: Synthetic oligonucleotide
  source 1..50: mol_type = other RNA
gccaccccaaaaatgaaggggactaaaacacgaacaacccttcaggatac

SEQ ID NO: 1107 - RNA, 50 nt, synthetic construct
  misc_feature 1..50: note = Description of Artificial Sequence: Synthetic oligonucleotide
  source 1..50: mol_type = other RNA
gccaccccaaaaatgaaggggactaaaacacaggatacttaaagtatcag

SEQ ID NO: 1108 - RNA, 50 nt, synthetic construct
  misc_feature 1..50: note = Description of Artificial Sequence: Synthetic oligonucleotide
  source 1..50: mol_type = other RNA
gccaccccaaaaatgaaggggactaaaacaacccttcaggatacttaaag

SEQ ID NO: 1109 - RNA, 50 nt, synthetic construct
  misc_feature 1..50: note = Description of Artificial Sequence: Synthetic oligonucleotide
  source 1..50: mol_type = other RNA
gccaccccaaaaatgaaggggactaaaacagcgggtgcgctttgcttacc

SEQ ID NO: 1110 - RNA, 50 nt, synthetic construct
  misc_feature 1..50: note = Description of Artificial Sequence: Synthetic oligonucleotide
  source 1..50: mol_type = other RNA
gccaccccaaaaatgaaggggactaaaacaggtgggtaagcgaagcgcac

SEQ ID NO: 1111 - RNA, 50 nt, synthetic construct
  misc_feature 1..50: note = Description of Artificial Sequence: Synthetic oligonucleotide
  source 1..50: mol_type = other RNA
gccaccccaaaaatgaaggggactaaaacagtgcgcttcgcttacccacc

SEQ ID NO: 1112 - RNA, 50 nt, synthetic construct
  misc_feature 1..50: note = Description of Artificial Sequence: Synthetic oligonucleotide
  source 1..50: mol_type = other RNA
gccaccccaaaaatgaaggggactaaaacattaccactaccaggaggacc

SEQ ID NO: 1113 - RNA, 50 nt, synthetic construct
  misc_feature 1..50: note = Description of Artificial Sequence: Synthetic oligonucleotide
  source 1..50: mol_type = other RNA
gccaccccaaaaatgaaggggactaaaacaccccgcactcgtttaaataa

SEQ ID NO: 1114 - RNA, 50 nt, synthetic construct
  misc_feature 1..50: note = Description of Artificial Sequence: Synthetic oligonucleotide
  source 1..50: mol_type = other RNA
gccaccccaaaaatgaaggggactaaaacaggataatcccaacccataag

SEQ ID NO: 1115 - RNA, 50 nt, synthetic construct
  misc_feature 1..50: note = Description of Artificial Sequence: Synthetic oligonucleotide
  source 1..50: mol_type = other RNA
gccaccccaaaaatgaaggggactaaaacattaggataatcccaacccat

SEQ ID NO: 1116 - RNA, 50 nt, synthetic construct
  misc_feature 1..50: note = Description of Artificial Sequence: Synthetic oligonucleotide
  source 1..50: mol_type = other RNA
gccaccccaaaaatgaaggggactaaaacactattcttagcactaatagc

SEQ ID NO: 1117 - RNA, 50 nt, synthetic construct
  misc_feature 1..50: note = Description of Artificial Sequence: Synthetic oligonucleotide
  source 1..50: mol_type = other RNA
gccaccccaaaaatgaaggggactaaaacatgtaccctcgatcgtactcc

SEQ ID NO: 1118 - RNA, 50 nt, synthetic construct
  misc_feature 1..50: note = Description of Artificial Sequence: Synthetic oligonucleotide
  source 1..50: mol_type = other RNA
gccaccccaaaaatgaaggggactaaaacatcgtactccgcgtggcctcg

SEQ ID NO: 1119 - RNA, 50 nt, synthetic construct
  misc_feature 1..50: note = Description of Artificial Sequence: Synthetic oligonucleotide
  source 1..50: mol_type = other RNA
gccaccccaaaaatgaaggggactaaaacacctcgatcgtactccgcgtg

SEQ ID NO: 1120 - RNA, 50 nt, synthetic construct
  misc_feature 1..50: note = Description of Artificial Sequence: Synthetic oligonucleotide
  source 1..50: mol_type = other RNA
gccaccccaaaaatgaaggggactaaaacatccgcgtgtgtaaacggcgt

SEQ ID NO: 1121 - RNA, 50 nt, synthetic construct
  misc_feature 1..50: note = Description of Artificial Sequence: Synthetic oligonucleotide
  source 1..50: mol_type = other RNA
gccaccccaaaaatgaaggggactaaaacacgtgtgtcctcgacgcgggt

SEQ ID NO: 1122 - RNA, 50 nt, synthetic construct
  misc_feature 1..50: note = Description of Artificial Sequence: Synthetic oligonucleotide
  source 1..50: mol_type = other RNA
gccaccccaaaaatgaaggggactaaaacaataccggcgcatgcgcacga

SEQ ID NO: 1123 - RNA, 50 nt, synthetic construct
  misc_feature 1..50: note = Description of Artificial Sequence: Synthetic oligonucleotide
  source 1..50: mol_type = other RNA
gccaccccaaaaatgaaggggactaaaacagtgctcccattatactaata

SEQ ID NO: 1124 - RNA, 50 nt, synthetic construct
  misc_feature 1..50: note = Description of Artificial Sequence: Synthetic oligonucleotide
  source 1..50: mol_type = other RNA
gccaccccaaaaatgaaggggactaaaacatacctgctaaaagccatagt

SEQ ID NO: 1125 - RNA, 50 nt, synthetic construct
  misc_feature 1..50: note = Description of Artificial Sequence: Synthetic oligonucleotide
  source 1..50: mol_type = other RNA
gccaccccaaaaatgaaggggactaaaacataagtgctcccattatacta

SEQ ID NO: 1126 - RNA, 50 nt, synthetic construct
  misc_feature 1..50: note = Description of Artificial Sequence: Synthetic oligonucleotide
  source 1..50: mol_type = other RNA
gccaccccaaaaatgaaggggactaaaacacttgtctatttagttttagt

SEQ ID NO: 1127 - RNA, 50 nt, synthetic construct
  misc_feature 1..50: note = Description of Artificial Sequence: Synthetic oligonucleotide
  source 1..50: mol_type = other RNA
gccaccccaaaaatgaaggggactaaaacagtctatttagttttagttct

SEQ ID NO: 1128 - RNA, 50 nt, synthetic construct
  misc_feature 1..50: note = Description of Artificial Sequence: Synthetic oligonucleotide
  source 1..50: mol_type = other RNA
gccaccccaaaaatgaaggggactaaaacatagttttagttctttctcta

SEQ ID NO: 1129 - RNA, 50 nt, synthetic construct
  misc_feature 1..50: note = Description of Artificial Sequence: Synthetic oligonucleotide
  source 1..50: mol_type = other RNA
gccaccccaaaaatgaaggggactaaaacatcttacatcttatgaatggg

SEQ ID NO: 1130 - RNA, 50 nt, synthetic construct
  misc_feature 1..50: note = Description of Artificial Sequence: Synthetic oligonucleotide
  source 1..50: mol_type = other RNA
gccaccccaaaaatgaaggggactaaaacaggatcttacatcttatgaat

SEQ ID NO: 1131 - RNA, 50 nt, synthetic construct
  misc_feature 1..50: note = Description of Artificial Sequence: Synthetic oligonucleotide
  source 1..50: mol_type = other RNA
gccaccccaaaaatgaaggggactaaaacagcaccagaggtgcatccatt

SEQ ID NO: 1132 - RNA, 50 nt, synthetic construct
  misc_feature 1..50: note = Description of Artificial Sequence: Synthetic oligonucleotide
  source 1..50: mol_type = other RNA
gccaccccaaaaatgaaggggactaaaacaaccgtgatctctaggtctaa

SEQ ID NO: 1133 - RNA, 50 nt, synthetic construct
  misc_feature 1..50: note = Description of Artificial Sequence: Synthetic oligonucleotide
  source 1..50: mol_type = other RNA
gccaccccaaaaatgaaggggactaaaacatcatatgctctaccgtgatc

SEQ ID NO: 1134 - RNA, 50 nt, synthetic construct
  misc_feature 1..50: note = Description of Artificial Sequence: Synthetic oligonucleotide
  source 1..50: mol_type = other RNA
gccaccccaaaaatgaaggggactaaaacagattgtatctgcaactaatc

SEQ ID NO: 1135 - RNA, 50 nt, synthetic construct
  misc_feature 1..50: note = Description of Artificial Sequence: Synthetic oligonucleotide
  source 1..50: mol_type = other RNA
gccaccccaaaaatgaaggggactaaaacatgggaagcgctctccaaatg

SEQ ID NO: 1136 - RNA, 50 nt, synthetic construct
  misc_feature 1..50: note = Description of Artificial Sequence: Synthetic oligonucleotide
  source 1..50: mol_type = other RNA
gccaccccaaaaatgaaggggactaaaacagctctccaaatggttaagct

SEQ ID NO: 1137 - RNA, 50 nt, synthetic construct
  misc_feature 1..50: note = Description of Artificial Sequence: Synthetic oligonucleotide
  source 1..50: mol_type = other RNA
gccaccccaaaaatgaaggggactaaaacaaatggttaagctacctactt

SEQ ID NO: 1138 - RNA, 50 nt, synthetic construct
  misc_feature 1..50: note = Description of Artificial Sequence: Synthetic oligonucleotide
  source 1..50: mol_type = other RNA
gccaccccaaaaatgaaggggactaaaacatagatcagcttctaatttac

SEQ ID NO: 1139 - RNA, 50 nt, synthetic construct
  misc_feature 1..50: note = Description of Artificial Sequence: Synthetic oligonucleotide
  source 1..50: mol_type = other RNA
gccaccccaaaaatgaaggggactaaaacatcgtttttagattttagatc

SEQ ID NO: 1140 - RNA, 50 nt, synthetic construct
  misc_feature 1..50: note = Description of Artificial Sequence: Synthetic oligonucleotide
  source 1..50: mol_type = other RNA
gccaccccaaaaatgaaggggactaaaacaagtttcaaattgagagatta

SEQ ID NO: 1141 - RNA, 50 nt, synthetic construct
  misc_feature 1..50: note = Description of Artificial Sequence: Synthetic oligonucleotide
  source 1..50: mol_type = other RNA
gccaccccaaaaatgaaggggactaaaacaaccccgtacccgtttaaata

SEQ ID NO: 1142 - RNA, 50 nt, synthetic construct
  misc_feature 1..50: note = Description of Artificial Sequence: Synthetic oligonucleotide
  source 1..50: mol_type = other RNA
gccaccccaaaaatgaaggggactaaaacaccgtacccgtttaaataatt

SEQ ID NO: 1143 - RNA, 50 nt, synthetic construct
  misc_feature 1..50: note = Description of Artificial Sequence: Synthetic oligonucleotide
  source 1..50: mol_type = other RNA
gccaccccaaaaatgaaggggactaaaacagctaagtcaagtctcgcaaa

SEQ ID NO: 1144 - RNA, 50 nt, synthetic construct
  misc_feature 1..50: note = Description of Artificial Sequence: Synthetic oligonucleotide
  source 1..50: mol_type = other RNA
gccaccccaaaaatgaaggggactaaaacaaatggacggacgggctgtcc

SEQ ID NO: 1145 - RNA, 50 nt, synthetic construct
  misc_feature 1..50: note = Description of Artificial Sequence: Synthetic oligonucleotide
  source 1..50: mol_type = other RNA
gccaccccaaaaatgaaggggactaaaacattgatgattactaccccgcc

SEQ ID NO: 1146 - RNA, 50 nt, synthetic construct
  misc_feature 1..50: note = Description of Artificial Sequence: Synthetic oligonucleotide
  source 1..50: mol_type = other RNA
gccaccccaaaaatgaaggggactaaaacattagtgaactcgtccgcacc

SEQ ID NO: 1147 - RNA, 50 nt, synthetic construct
  misc_feature 1..50: note = Description of Artificial Sequence: Synthetic oligonucleotide
  source 1..50: mol_type = other RNA
gccaccccaaaaatgaaggggactaaaacacgtatcgagggtgaacaacc

SEQ ID NO: 1148 - RNA, 50 nt, synthetic construct
  misc_feature 1..50: note = Description of Artificial Sequence: Synthetic oligonucleotide
  source 1..50: mol_type = other RNA
gccaccccaaaaatgaaggggactaaaacatcacttctttcgtatcgagg

SEQ ID NO: 1149 - RNA, 50 nt, synthetic construct
  misc_feature 1..50: note = Description of Artificial Sequence: Synthetic oligonucleotide
  source 1..50: mol_type = other RNA
gccaccccaaaaatgaaggggactaaaacacgaccgccaacgatagagtc

SEQ ID NO: 1150 - RNA, 50 nt, synthetic construct
  misc_feature 1..50: note = Description of Artificial Sequence: Synthetic oligonucleotide
  source 1..50: mol_type = other RNA
gccaccccaaaaatgaaggggactaaaacaggtatatctggtacacgcgt

SEQ ID NO: 1151 - RNA, 50 nt, synthetic construct
  misc_feature 1..50: note = Description of Artificial Sequence: Synthetic oligonucleotide
  source 1..50: mol_type = other RNA
gccaccccaaaaatgaaggggactaaaacaggacgaccccattgttccgc

SEQ ID NO: 1152 - RNA, 50 nt, synthetic construct
  misc_feature 1..50: note = Description of Artificial Sequence: Synthetic oligonucleotide
  source 1..50: mol_type = other RNA
gccaccccaaaaatgaaggggactaaaacagaagtcacgcgaatcaggcg

SEQ ID NO: 1153 - RNA, 50 nt, synthetic construct
  misc_feature 1..50: note = Description of Artificial Sequence: Synthetic oligonucleotide
  source 1..50: mol_type = other RNA
gccaccccaaaaatgaaggggactaaaacagcgccttgattgaaagccgt

SEQ ID NO: 1154 - RNA, 50 nt, synthetic construct
  misc_feature 1..50: note = Description of Artificial Sequence: Synthetic oligonucleotide
  source 1..50: mol_type = other RNA
gccaccccaaaaatgaaggggactaaaacatatgagcaaccggcagcata

SEQ ID NO: 1155 - RNA, 50 nt, synthetic construct
  misc_feature 1..50: note = Description of Artificial Sequence: Synthetic oligonucleotide
  source 1..50: mol_type = other RNA
gccaccccaaaaatgaaggggactaaaacaattggtatgtcgagctgttg

SEQ ID NO: 1156 - RNA, 50 nt, synthetic construct
  misc_feature 1..50: note = Description of Artificial Sequence: Synthetic oligonucleotide
  source 1..50: mol_type = other RNA
gccaccccaaaaatgaaggggactaaaacatgtattggtatgtcgagctg

SEQ ID NO: 1157 - RNA, 50 nt, synthetic construct
  misc_feature 1..50: note = Description of Artificial Sequence: Synthetic oligonucleotide
  source 1..50: mol_type = other RNA
gccaccccaaaaatgaaggggactaaaacaggtatgtcgagctgttgccg

SEQ ID NO: 1158 - RNA, 50 nt, synthetic construct
  misc_feature 1..50: note = Description of Artificial Sequence: Synthetic oligonucleotide
  source 1..50: mol_type = other RNA
gccaccccaaaaatgaaggggactaaaacagaacccttacccgtagttag

SEQ ID NO: 1159 - RNA, 50 nt, synthetic construct
  misc_feature 1..50: note = Description of Artificial Sequence: Synthetic oligonucleotide
  source 1..50: mol_type = other RNA
gccaccccaaaaatgaaggggactaaaacaagtaatgaacccttacccgt

SEQ ID NO: 1160 - RNA, 50 nt, synthetic construct
  misc_feature 1..50: note = Description of Artificial Sequence: Synthetic oligonucleotide
  source 1..50: mol_type = other RNA
gccaccccaaaaatgaaggggactaaaacataggttagcaatgcgaaagc

SEQ ID NO: 1161 - RNA, 50 nt, synthetic construct
  misc_feature 1..50: note = Description of Artificial Sequence: Synthetic oligonucleotide
  source 1..50: mol_type = other RNA
gccaccccaaaaatgaaggggactaaaacaggcactctgttaatccgaca

SEQ ID NO: 1162 - RNA, 50 nt, synthetic construct
  misc_feature 1..50: note = Description of Artificial Sequence: Synthetic oligonucleotide
  source 1..50: mol_type = other RNA
gccaccccaaaaatgaaggggactaaaacaggtcaatccattcaagctta

SEQ ID NO: 1163 - RNA, 50 nt, synthetic construct
  misc_feature 1..50: note = Description of Artificial Sequence: Synthetic oligonucleotide
  source 1..50: mol_type = other RNA
gccaccccaaaaatgaaggggactaaaacaatgacctcccttaccaacta

SEQ ID NO: 1164 - RNA, 50 nt, synthetic construct
  misc_feature 1..50: note = Description of Artificial Sequence: Synthetic oligonucleotide
  source 1..50: mol_type = other RNA
gccaccccaaaaatgaaggggactaaaacagggtcacgcgggaacaacct

SEQ ID NO: 1165 - RNA, 50 nt, synthetic construct
  misc_feature 1..50: note = Description of Artificial Sequence: Synthetic oligonucleotide
  source 1..50: mol_type = other RNA
gccaccccaaaaatgaaggggactaaaacatacagggtcacgcgggaaca

SEQ ID NO: 1166 - RNA, 50 nt, synthetic construct
  misc_feature 1..50: note = Description of Artificial Sequence: Synthetic oligonucleotide
  source 1..50: mol_type = other RNA
gccaccccaaaaatgaaggggactaaaacacagaccactgcttgctagac

SEQ ID NO: 1167 - RNA, 50 nt, synthetic construct
  misc_feature 1..50: note = Description of Artificial Sequence: Synthetic oligonucleotide
  source 1..50: mol_type = other RNA
gccaccccaaaaatgaaggggactaaaacataaggtgacgtcctaaacca

SEQ ID NO: 1168 - RNA, 50 nt, synthetic construct
  misc_feature 1..50: note = Description of Artificial Sequence: Synthetic oligonucleotide
  source 1..50: mol_type = other RNA
gccaccccaaaaatgaaggggactaaaacagtgacgtcctaaaccaccct

SEQ ID NO: 1169 - RNA, 50 nt, synthetic construct
  misc_feature 1..50: note = Description of Artificial Sequence: Synthetic oligonucleotide
  source 1..50: mol_type = other RNA
gccaccccaaaaatgaaggggactaaaacaagtcacttaaggtgacgtcc

SEQ ID NO: 1170 - RNA, 50 nt, synthetic construct
  misc_feature 1..50: note = Description of Artificial Sequence: Synthetic oligonucleotide
  source 1..50: mol_type = other RNA
gccaccccaaaaatgaaggggactaaaacacgtttatgcttacgaatggg

SEQ ID NO: 1171 - RNA, 50 nt, synthetic construct
  misc_feature 1..50: note = Description of Artificial Sequence: Synthetic oligonucleotide
  source 1..50: mol_type = other RNA
gccaccccaaaaatgaaggggactaaaacaatgagcgtttatgcttacga

SEQ ID NO: 1172 - RNA, 50 nt, synthetic construct
  misc_feature 1..50: note = Description of Artificial Sequence: Synthetic oligonucleotide
  source 1..50: mol_type = other RNA
gccaccccaaaaatgaaggggactaaaacagtatgctccgcaagatatag

SEQ ID NO: 1173 - RNA, 50 nt, synthetic construct
  misc_feature 1..50: note = Description of Artificial Sequence: Synthetic oligonucleotide
  source 1..50: mol_type = other RNA
gccaccccaaaaatgaaggggactaaaacagggaatcaggtaccacatcc

SEQ ID NO: 1174 - RNA, 50 nt, synthetic construct
  misc_feature 1..50: note = Description of Artificial Sequence: Synthetic oligonucleotide
  source 1..50: mol_type = other RNA
gccaccccaaaaatgaaggggactaaaacagtctacgtaagagaactata

SEQ ID NO: 1175 - RNA, 50 nt, synthetic construct
  misc_feature 1..50: note = Description of Artificial Sequence: Synthetic oligonucleotide
  source 1..50: mol_type = other RNA
gccaccccaaaaatgaaggggactaaaacagtagtatgctccggaaaatg

SEQ ID NO: 1176 - RNA, 50 nt, synthetic construct
  misc_feature 1..50: note = Description of Artificial Sequence: Synthetic oligonucleotide
  source 1..50: mol_type = other RNA
gccaccccaaaaatgaaggggactaaaacaccacccacaacggattaact

SEQ ID NO: 1177 - RNA, 50 nt, synthetic construct
  misc_feature 1..50: note = Description of Artificial Sequence: Synthetic oligonucleotide
  source 1..50: mol_type = other RNA
gccaccccaaaaatgaaggggactaaaacagctaaacccacccacaacgg

SEQ ID NO: 1178 - RNA, 50 nt, synthetic construct
  misc_feature 1..50: note = Description of Artificial Sequence: Synthetic oligonucleotide
  source 1..50: mol_type = other RNA
gccaccccaaaaatgaaggggactaaaacaggctacttaaggtagcctgg

SEQ ID NO: 1179 - RNA, 50 nt, synthetic construct
  misc_feature 1..50: note = Description of Artificial Sequence: Synthetic oligonucleotide
  source 1..50: mol_type = other RNA
gccaccccaaaaatgaaggggactaaaacacgggacagagaatgcttagt

SEQ ID NO: 1180 - RNA, 50 nt, synthetic construct
  misc_feature 1..50: note = Description of Artificial Sequence: Synthetic oligonucleotide
  source 1..50: mol_type = other RNA
gccaccccaaaaatgaaggggactaaaacagcttccttacgggacagaga

SEQ ID NO: 1181 - RNA, 50 nt, synthetic construct
  misc_feature 1..50: note = Description of Artificial Sequence: Synthetic oligonucleotide
  source 1..50: mol_type = other RNA
gccaccccaaaaatgaaggggactaaaacagtagacaccgcaagatgtta

SEQ ID NO: 1182 - RNA, 50 nt, synthetic construct
  misc_feature 1..50: note = Description of Artificial Sequence: Synthetic oligonucleotide
  source 1..50: mol_type = other RNA
gccaccccaaaaatgaaggggactaaaacatctatcgagactttcgaact

SEQ ID NO: 1183 - RNA, 50 nt, synthetic construct
  misc_feature 1..50: note = Description of Artificial Sequence: Synthetic oligonucleotide
  source 1..50: mol_type = other RNA
gccaccccaaaaatgaaggggactaaaacacgagactttcgaactggtca

SEQ ID NO: 1184 - RNA, 50 nt, synthetic construct
  misc_feature 1..50: note = Description of Artificial Sequence: Synthetic oligonucleotide
  source 1..50: mol_type = other RNA
gccaccccaaaaatgaaggggactaaaacagtagtagtatgctccggaaa

SEQ ID NO: 1185 - RNA, 50 nt, synthetic construct
  misc_feature 1..50: note = Description of Artificial Sequence: Synthetic oligonucleotide
  source 1..50: mol_type = other RNA
gccaccccaaaaatgaaggggactaaaacatcacattgttgggcccacta

SEQ ID NO: 1186 - RNA, 50 nt, synthetic construct
  misc_feature 1..50: note = Description of Artificial Sequence: Synthetic oligonucleotide
  source 1..50: mol_type = other RNA
gccaccccaaaaatgaaggggactaaaacacatgttgaggtagtaaattg

SEQ ID NO: 1187 - RNA, 50 nt, synthetic construct
  misc_feature 1..50: note = Description of Artificial Sequence: Synthetic oligonucleotide
  source 1..50: mol_type = other RNA
gccaccccaaaaatgaaggggactaaaacaggctggtaacaataacaagc

SEQ ID NO: 1188 - RNA, 50 nt, synthetic construct
  misc_feature 1..50: note = Description of Artificial Sequence: Synthetic oligonucleotide
  source 1..50: mol_type = other RNA
gccaccccaaaaatgaaggggactaaaacatagtatgctccgcaggaaca

SEQ ID NO: 1189 - RNA, 50 nt, synthetic construct
  misc_feature 1..50: note = Description of Artificial Sequence: Synthetic oligonucleotide
  source 1..50: mol_type = other RNA
gccaccccaaaaatgaaggggactaaaacatttgcataactaggcctacg

SEQ ID NO: 1190 - RNA, 50 nt, synthetic construct
  misc_feature 1..50: note = Description of Artificial Sequence: Synthetic oligonucleotide
  source 1..50: mol_type = other RNA
gccaccccaaaaatgaaggggactaaaacaggcataatcggtatggagta

SEQ ID NO: 1191 - RNA, 50 nt, synthetic construct
  misc_feature 1..50: note = Description of Artificial Sequence: Synthetic oligonucleotide
  source 1..50: mol_type = other RNA
gccaccccaaaaatgaaggggactaaaacatatgctccgagaaaagagcg

SEQ ID NO: 1192 - RNA, 50 nt, synthetic construct
  misc_feature 1..50: note = Description of Artificial Sequence: Synthetic oligonucleotide
  source 1..50: mol_type = other RNA
gccaccccaaaaatgaaggggactaaaacataaggaatcgggtagcacat

SEQ ID NO: 1193 - RNA, 50 nt, synthetic construct
  misc_feature 1..50: note = Description of Artificial Sequence: Synthetic oligonucleotide
  source 1..50: mol_type = other RNA
gccaccccaaaaatgaaggggactaaaacacgctttaacaagatatcagc

SEQ ID NO: 1194 - RNA, 50 nt, synthetic construct
  misc_feature 1..50: note = Description of Artificial Sequence: Synthetic oligonucleotide
  source 1..50: mol_type = other RNA
gccaccccaaaaatgaaggggactaaaacaatggaagttgtccactgcct

SEQ ID NO: 1195 - RNA, 50 nt, synthetic construct
  misc_feature 1..50: note = Description of Artificial Sequence: Synthetic oligonucleotide
  source 1..50: mol_type = other RNA
gccaccccaaaaatgaaggggactaaaacaccgagatggaagttgtccac

SEQ ID NO: 1196 - RNA, 50 nt, synthetic construct
  misc_feature 1..50: note = Description of Artificial Sequence: Synthetic oligonucleotide
  source 1..50: mol_type = other RNA
gccaccccaaaaatgaaggggactaaaacaatcaccgagatggaagttgt

SEQ ID NO: 1197 - RNA, 50 nt, synthetic construct
  misc_feature 1..50: note = Description of Artificial Sequence: Synthetic oligonucleotide
  source 1..50: mol_type = other RNA
gccaccccaaaaatgaaggggactaaaacaaaccaattgcctcgtacctc

SEQ ID NO: 1198 - RNA, 50 nt, synthetic construct
  misc_feature 1..50: note = Description of Artificial Sequence: Synthetic oligonucleotide
  source 1..50: mol_type = other RNA
gccaccccaaaaatgaaggggactaaaacacctgcaaccaattgcctcgt

SEQ ID NO: 1199 - RNA, 50 nt, synthetic construct
  misc_feature 1..50: note = Description of Artificial Sequence: Synthetic oligonucleotide
  source 1..50: mol_type = other RNA
gccaccccaaaaatgaaggggactaaaacacgtacctctccatgatgccc

SEQ ID NO: 1200 - RNA, 50 nt, synthetic construct
  misc_feature 1..50: note = Description of Artificial Sequence: Synthetic oligonucleotide
  source 1..50: mol_type = other RNA
gccaccccaaaaatgaaggggactaaaacagatgtcaagacaacaccccg

SEQ ID NO: 1201 - RNA, 50 nt, synthetic construct
  misc_feature 1..50: note = Description of Artificial Sequence: Synthetic oligonucleotide
  source 1..50: mol_type = other RNA
gccaccccaaaaatgaaggggactaaaacacactatggccacctttcccg

SEQ ID NO: 1202 - RNA, 50 nt, synthetic construct
  misc_feature 1..50: note = Description of Artificial Sequence: Synthetic oligonucleotide
  source 1..50: mol_type = other RNA
gccaccccaaaaatgaaggggactaaaacagacagtattttgtcctcgtg

SEQ ID NO: 1203 - RNA, 50 nt, synthetic construct
  misc_feature 1..50: note = Description of Artificial Sequence: Synthetic oligonucleotide
  source 1..50: mol_type = other RNA
gccaccccaaaaatgaaggggactaaaacatagtatgctccttgaaaagc

SEQ ID NO: 1204 - RNA, 50 nt, synthetic construct
  misc_feature 1..50: note = Description of Artificial Sequence: Synthetic oligonucleotide
  source 1..50: mol_type = other RNA
gccaccccaaaaatgaaggggactaaaacaggtagattgttgtaatgaag

SEQ ID NO: 1205 - RNA, 50 nt, synthetic construct
  misc_feature 1..50: note = Description of Artificial Sequence: Synthetic oligonucleotide
  source 1..50: mol_type = other RNA
gccaccccaaaaatgaaggggactaaaacaaatgaggtagattgttgtaa

SEQ ID NO: 1206 - RNA, 50 nt, synthetic construct
  misc_feature 1..50: note = Description of Artificial Sequence: Synthetic oligonucleotide
  source 1..50: mol_type = other RNA
gccaccccaaaaatgaaggggactaaaacacctcgtaataagcaaatggg

SEQ ID NO: 1207 - RNA, 50 nt, synthetic construct
  misc_feature 1..50: note = Description of Artificial Sequence: Synthetic oligonucleotide
  source 1..50: mol_type = other RNA
gccaccccaaaaatgaaggggactaaaacagctaaaaaggagtatcgata

SEQ ID NO: 1208 - RNA, 50 nt, synthetic construct
  misc_feature 1..50: note = Description of Artificial Sequence: Synthetic oligonucleotide
  source 1..50: mol_type = other RNA
gccaccccaaaaatgaaggggactaaaacacggaccaaccgttgtgcatc

SEQ ID NO: 1209 - RNA, 50 nt, synthetic construct
  misc_feature 1..50: note = Description of Artificial Sequence: Synthetic oligonucleotide
  source 1..50: mol_type = other RNA
gccaccccaaaaatgaaggggactaaaacattctctcggaccaaccgttg

SEQ ID NO: 1210 - RNA, 50 nt, synthetic construct
  misc_feature 1..50: note = Description of Artificial Sequence: Synthetic oligonucleotide
  source 1..50: mol_type = other RNA
gccaccccaaaaatgaaggggactaaaacataacaacacatcaacgtgcc

SEQ ID NO: 1211 - RNA, 50 nt, synthetic construct
  misc_feature 1..50: note = Description of Artificial Sequence: Synthetic oligonucleotide
  source 1..50: mol_type = other RNA
gccaccccaaaaatgaaggggactaaaacattgtcactttttaattctgg

SEQ ID NO: 1212 - RNA, 50 nt, synthetic construct
  misc_feature 1..50: note = Description of Artificial Sequence: Synthetic oligonucleotide
  source 1..50: mol_type = other RNA
gccaccccaaaaatgaaggggactaaaacagcctcttttgtacaaagagc

SEQ ID NO: 1213 - RNA, 50 nt, synthetic construct
  misc_feature 1..50: note = Description of Artificial Sequence: Synthetic oligonucleotide
  source 1..50: mol_type = other RNA
gccaccccaaaaatgaaggggactaaaacactttttgcctcttttgtaca

SEQ ID NO: 1214 - RNA, 50 nt, synthetic construct
  misc_feature 1..50: note = Description of Artificial Sequence: Synthetic oligonucleotide
  source 1..50: mol_type = other RNA
gccaccccaaaaatgaaggggactaaaacaaccgaacgtggctatccagc

SEQ ID NO: 1215 - RNA, 50 nt, synthetic construct
  misc_feature 1..50: note = Description of Artificial Sequence: Synthetic oligonucleotide
  source 1..50: mol_type = other RNA
gccaccccaaaaatgaaggggactaaaacaagttttcggccggttagcac

SEQ ID NO: 1216 - RNA, 50 nt, synthetic construct
  misc_feature 1..50: note = Description of Artificial Sequence: Synthetic oligonucleotide
  source 1..50: mol_type = other RNA
gccaccccaaaaatgaaggggactaaaacatcagcggttatcctgaccga

SEQ ID NO: 1217 - RNA, 50 nt, synthetic construct
  misc_feature 1..50: note = Description of Artificial Sequence: Synthetic oligonucleotide
  source 1..50: mol_type = other RNA
gccaccccaaaaatgaaggggactaaaacactgtatcgcgcgcctttcca

SEQ ID NO: 1218 - RNA, 50 nt, synthetic construct
  misc_feature 1..50: note = Description of Artificial Sequence: Synthetic oligonucleotide
  source 1..50: mol_type = other RNA
gccaccccaaaaatgaaggggactaaaacatgtcaccctgtatcgcgcgc

SEQ ID NO: 1219 - RNA, 50 nt, synthetic construct
  misc_feature 1..50: note = Description of Artificial Sequence: Synthetic oligonucleotide
  source 1..50: mol_type = other RNA
gccaccccaaaaatgaaggggactaaaacaggctgtcaccctgtatcgcg

SEQ ID NO: 1220 - RNA, 50 nt, synthetic construct
  misc_feature 1..50: note = Description of Artificial Sequence: Synthetic oligonucleotide
  source 1..50: mol_type = other RNA
gccaccccaaaaatgaaggggactaaaacatacagtagttagcgctatga

SEQ ID NO: 1221 - RNA, 50 nt, synthetic construct
  misc_feature 1..50: note = Description of Artificial Sequence: Synthetic oligonucleotide
  source 1..50: mol_type = other RNA
gccaccccaaaaatgaaggggactaaaacagtcttttgtcacgaggataa

SEQ ID NO: 1222 - RNA, 50 nt, synthetic construct
  misc_feature 1..50: note = Description of Artificial Sequence: Synthetic oligonucleotide
  source 1..50: mol_type = other RNA
gccaccccaaaaatgaaggggactaaaacagctatgcatccatgcatcgc

SEQ ID NO: 1223 - RNA, 41 nt, synthetic construct
  misc_feature 1..41: note = Description of Artificial Sequence: Synthetic oligonucleotide
  source 1..41: mol_type = other RNA
taatttctactaagtgtagatgtccgagcgtcattgctgcc

SEQ ID NO: 1224 - RNA, 41 nt, synthetic construct
  misc_feature 1..41: note = Description of Artificial Sequence: Synthetic oligonucleotide
  source 1..41: mol_type = other RNA
taatttctactaagtgtagatgttcttcatcgatgccggaa

SEQ ID NO: 1225 - RNA, 41 nt, synthetic construct
  misc_feature 1..41: note = Description of Artificial Sequence: Synthetic oligonucleotide
  source 1..41: mol_type = other RNA
taatttctactaagtgtagatagggcagcaatgacgctcgg

SEQ ID NO: 1226 - RNA, 41 nt, synthetic construct
  misc_feature 1..41: note = Description of Artificial Sequence: Synthetic oligonucleotide
  source 1..41: mol_type = other RNA
taatttctactaagtgtagatttgtgcgctatcggtctccg

SEQ ID NO: 1227 - RNA, 41 nt, synthetic construct
  misc_feature 1..41: note = Description of Artificial Sequence: Synthetic oligonucleotide
  source 1..41: mol_type = other RNA
taatttctactaagtgtagatacaactcgactcgtcgaagg

SEQ ID NO: 1228 - RNA, 41 nt, synthetic construct
  misc_feature 1..41: note = Description of Artificial Sequence: Synthetic oligonucleotide
  source 1..41: mol_type = other RNA
taatttctactaagtgtagatgccgaagcgcgttcctcggt

SEQ ID NO: 1229 - RNA, 41 nt, synthetic construct
  misc_feature 1..41: note = Description of Artificial Sequence: Synthetic oligonucleotide
  source 1..41: mol_type = other RNA
taatttctactaagtgtagatttatcgcatttcgctgcgtt

SEQ ID NO: 1230 - RNA, 41 nt, synthetic construct
  misc_feature 1..41: note = Description of Artificial Sequence: Synthetic oligonucleotide
  source 1..41: mol_type = other RNA
taatttctactaagtgtagataataccagggggcgcaatgt

SEQ ID NO: 1231 - RNA, 41 nt, synthetic construct
  misc_feature 1..41: note = Description of Artificial Sequence: Synthetic oligonucleotide
  source 1..41: mol_type = other RNA
taatttctactaagtgtagatcgcatttcgctgcgttcttc

SEQ ID NO: 1232 - RNA, 41 nt, synthetic construct
  misc_feature 1..41: note = Description of Artificial Sequence: Synthetic oligonucleotide
  source 1..41: mol_type = other RNA
taatttctactaagtgtagataggattcgaacctataatat

SEQ ID NO: 1233 - RNA, 41 nt, synthetic construct
  misc_feature 1..41: note = Description of Artificial Sequence: Synthetic oligonucleotide
  source 1..41: mol_type = other RNA
taatttctactaagtgtagataatattaacagtattccgct

SEQ ID NO: 1234 - RNA, 41 nt, synthetic construct
  misc_feature 1..41: note = Description of Artificial Sequence: Synthetic oligonucleotide
  source 1..41: mol_type = other RNA
taatttctactaagtgtagatttaaggcttacaggattcga

SEQ ID NO: 1235 - RNA, 41 nt, synthetic construct
  misc_feature 1..41: note = Description of Artificial Sequence: Synthetic oligonucleotide
  source 1..41: mol_type = other RNA
taatttctactaagtgtagatgtaaggtaaccttaactaat

SEQ ID NO: 1236 - RNA, 41 nt, synthetic construct
  misc_feature 1..41: note = Description of Artificial Sequence: Synthetic oligonucleotide
  source 1..41: mol_type = other RNA
taatttctactaagtgtagattcaatggaaggttctgttac

SEQ ID NO: 1237 - RNA, 41 nt, synthetic construct
  misc_feature 1..41: note = Description of Artificial Sequence: Synthetic oligonucleotide
  source 1..41: mol_type = other RNA
taatttctactaagtgtagattttgtatataaagaggcgac

SEQ ID NO: 1238 - RNA, 41 nt, synthetic construct
  misc_feature 1..41: note = Description of Artificial Sequence: Synthetic oligonucleotide
  source 1..41: mol_type = other RNA
taatttctactaagtgtagattcatcgatgcgagaaccaag

SEQ ID NO: 1239 - RNA, 41 nt, synthetic construct
  misc_feature 1..41: note = Description of Artificial Sequence: Synthetic oligonucleotide
  source 1..41: mol_type = other RNA
taatttctactaagtgtagatcttggttctcgcatcgatga

SEQ ID NO: 1240 - RNA, 41 nt, synthetic construct
  misc_feature 1..41: note = Description of Artificial Sequence: Synthetic oligonucleotide
  source 1..41: mol_type = other RNA
taatttctactaagtgtagattcgatgcgagaaccaagaga

SEQ ID NO: 1241 - RNA, 41 nt, synthetic construct
  misc_feature 1..41: note = Description of Artificial Sequence: Synthetic oligonucleotide
  source 1..41: mol_type = other RNA
taatttctactaagtgtagatccttgcgaccatactccccc

SEQ ID NO: 1242 - RNA, 41 nt, synthetic construct
  misc_feature 1..41: note = Description of Artificial Sequence: Synthetic oligonucleotide
  source 1..41: mol_type = other RNA
taatttctactaagtgtagatggttaagactacgacggtat

SEQ ID NO: 1243 - RNA, 41 nt, synthetic construct
  misc_feature 1..41: note = Description of Artificial Sequence: Synthetic oligonucleotide
  source 1..41: mol_type = other RNA
taatttctactaagtgtagatgtcaaattaagccgcaggct

SEQ ID NO: 1244 - RNA, 41 nt, synthetic construct
  misc_feature 1..41: note = Description of Artificial Sequence: Synthetic oligonucleotide
  source 1..41: mol_type = other RNA
taatttctactaagtgtagatttcgctatcggtctctcgcc

SEQ ID NO: 1245 - RNA, 41 nt, synthetic construct
  misc_feature 1..41: note = Description of Artificial Sequence: Synthetic oligonucleotide
  source 1..41: mol_type = other RNA
taatttctactaagtgtagatccctttcaacaatttcacgt

SEQ ID NO: 1246 - RNA, 41 nt, synthetic construct
  misc_feature 1..41: note = Description of Artificial Sequence: Synthetic oligonucleotide
  source 1..41: mol_type = other RNA
taatttctactaagtgtagatattcccaaacaactcgactc

SEQ ID NO: 1247 - RNA, 41 nt, synthetic construct
  misc_feature 1..41: note = Description of Artificial Sequence: Synthetic oligonucleotide
  source 1..41: mol_type = other RNA
taatttctactaagtgtagatcgacaacaatgtaacgcctg

SEQ ID NO: 1248 - RNA, 41 nt, synthetic construct
  misc_feature 1..41: note = Description of Artificial Sequence: Synthetic oligonucleotide
  source 1..41: mol_type = other RNA
taatttctactaagtgtagatggggacttgccgattagtca

SEQ ID NO: 1249 - RNA, 41 nt, synthetic construct
  misc_feature 1..41: note = Description of Artificial Sequence: Synthetic oligonucleotide
  source 1..41: mol_type = other RNA
taatttctactaagtgtagattgatgagtgattagtgcgaa

SEQ ID NO: 1250 - RNA, 41 nt, synthetic construct
  misc_feature 1..41: note = Description of Artificial Sequence: Synthetic oligonucleotide
  source 1..41: mol_type = other RNA
taatttctactaagtgtagatacggggttgccaatgttatg

SEQ ID NO: 1251 - RNA, 41 nt, synthetic construct
  misc_feature 1..41: note = Description of Artificial Sequence: Synthetic oligonucleotide
  source 1..41: mol_type = other RNA
taatttctactaagtgtagatacctcattattggagacgtg

SEQ ID NO: 1252 - RNA, 41 nt, synthetic construct
  misc_feature 1..41: note = Description of Artificial Sequence: Synthetic oligonucleotide
  source 1..41: mol_type = other RNA
taatttctactaagtgtagataactactccagttttcggta

SEQ ID NO: 1253 - RNA, 41 nt, synthetic construct
  misc_feature 1..41: note = Description of Artificial Sequence: Synthetic oligonucleotide
  source 1..41: mol_type = other RNA
taatttctactaagtgtagatagttttggctcgtttcgccg

SEQ ID NO: 1254 - RNA, 41 nt, synthetic construct
  misc_feature 1..41: note = Description of Artificial Sequence: Synthetic oligonucleotide
  source 1..41: mol_type = other RNA
taatttctactaagtgtagatgtcgttaatgcactcgacac

SEQ ID NO: 1255 - RNA, 41 nt, synthetic construct
  misc_feature 1..41: note = Description of Artificial Sequence: Synthetic oligonucleotide
  source 1..41: mol_type = other RNA
taatttctactaagtgtagatacgacttggttttgaacgcg

SEQ ID NO: 1256 - RNA, 41 nt, synthetic construct
  misc_feature 1..41: note = Description of Artificial Sequence: Synthetic oligonucleotide
  source 1..41: mol_type = other RNA
taatttctactaagtgtagatggtgccgcactaacgcatta

SEQ ID NO: 1257 - RNA, 41 nt, synthetic construct
  misc_feature 1..41: note = Description of Artificial Sequence: Synthetic oligonucleotide
  source 1..41: mol_type = other RNA
taatttctactaagtgtagatgtacaggatggacccgcgtc

SEQ ID NO: 1258 - RNA, 41 nt, synthetic construct
  misc_feature 1..41: note = Description of Artificial Sequence: Synthetic oligonucleotide
  source 1..41: mol_type = other RNA
taatttctactaagtgtagattaatcggagagttcccttcg

SEQ ID NO: 1259 - RNA, 41 nt, synthetic construct
  misc_feature 1..41: note = Description of Artificial Sequence: Synthetic oligonucleotide
  source 1..41: mol_type = other RNA
taatttctactaagtgtagatcgggaaacggattagcggcg

SEQ ID NO: 1260 - RNA, 41 nt, synthetic construct
  misc_feature 1..41: note = Description of Artificial Sequence: Synthetic oligonucleotide
  source 1..41: mol_type = other RNA
taatttctactaagtgtagataatcgaggaaatcccttcgg

SEQ ID NO: 1261 - RNA, 41 nt, synthetic construct
  misc_feature 1..41: note = Description of Artificial Sequence: Synthetic oligonucleotide
  source 1..41: mol_type = other RNA
taatttctactaagtgtagatctaacgcattaagtattccg

SEQ ID NO: 1262 - RNA, 41 nt, synthetic construct
  misc_feature 1..41: note = Description of Artificial Sequence: Synthetic oligonucleotide
  source 1..41: mol_type = other RNA
taatttctactaagtgtagataggcgacgtagggtagccga

SEQ ID NO: 1263 - RNA, 41 nt, synthetic construct
  misc_feature 1..41: note = Description of Artificial Sequence: Synthetic oligonucleotide
  source 1..41: mol_type = other RNA
taatttctactaagtgtagataagaggggaatagccctccg

SEQ ID NO: 1264 - RNA, 41 nt, synthetic construct
  misc_feature 1..41: note = Description of Artificial Sequence: Synthetic oligonucleotide
  source 1..41: mol_type = other RNA
taatttctactaagtgtagatagatgggcccgcgccccatt

SEQ ID NO: 1265 - RNA, 41 nt, synthetic construct
  misc_feature 1..41: note = Description of Artificial Sequence: Synthetic oligonucleotide
  source 1..41: mol_type = other RNA
taatttctactaagtgtagattcgcgtcgtctgtgaaattc

SEQ ID NO: 1266 - RNA, 41 nt, synthetic construct
  misc_feature 1..41: note = Description of Artificial Sequence: Synthetic oligonucleotide
  source 1..41: mol_type = other RNA
taatttctactaagtgtagatgttttagccttgcggccgta

SEQ ID NO: 1267 - RNA, 41 nt, synthetic construct
  misc_feature 1..41: note = Description of Artificial Sequence: Synthetic oligonucleotide
  source 1..41: mol_type = other RNA
taatttctactaagtgtagatagacgttcacgcttctcact

SEQ ID NO: 1268 - RNA, 41 nt, synthetic construct
  misc_feature 1..41: note = Description of Artificial Sequence: Synthetic oligonucleotide
  source 1..41: mol_type = other RNA
taatttctactaagtgtagatagtgagaagcgtgaacgtct

SEQ ID NO: 1269 - RNA, 41 nt, synthetic construct
  misc_feature 1..41: note = Description of Artificial Sequence: Synthetic oligonucleotide
  source 1..41: mol_type = other RNA
taatttctactaagtgtagatgagcgcaccaaccagggcac

SEQ ID NO: 1270 - RNA, 41 nt, synthetic construct
  misc_feature 1..41: note = Description of Artificial Sequence: Synthetic oligonucleotide
  source 1..41: mol_type = other RNA
taatttctactaagtgtagatagagtatcccgcagcgtcgt

SEQ ID NO: 1271 - RNA, 41 nt, synthetic construct
  misc_feature 1..41: note = Description of Artificial Sequence: Synthetic oligonucleotide
  source 1..41: mol_type = other RNA
taatttctactaagtgtagatacaataaatacgacgctgcg

SEQ ID NO: 1272 - RNA, 41 nt, synthetic construct
  misc_feature 1..41: note = Description of Artificial Sequence: Synthetic oligonucleotide
  source 1..41: mol_type = other RNA
taatttctactaagtgtagattacatcgcatcttggccacg

SEQ ID NO: 1273 - RNA, 41 nt, synthetic construct
  misc_feature 1..41: note = Description of Artificial Sequence: Synthetic oligonucleotide
  source 1..41: mol_type = other RNA
taatttctactaagtgtagatcggcgaactaatcaatgcac

SEQ ID NO: 1274 - RNA, 41 nt, synthetic construct
  misc_feature 1..41: note = Description of Artificial Sequence: Synthetic oligonucleotide
  source 1..41: mol_type = other RNA
taatttctactaagtgtagatccgcaggtcggagatataag

SEQ ID NO: 1275 - RNA, 41 nt, synthetic construct
  misc_feature 1..41: note = Description of Artificial Sequence: Synthetic oligonucleotide
  source 1..41: mol_type = other RNA
taatttctactaagtgtagataacggccggtttggaagcga

SEQ ID NO: 1276 - RNA, 41 nt, synthetic construct
  misc_feature 1..41: note = Description of Artificial Sequence: Synthetic oligonucleotide
  source 1..41: mol_type = other RNA
taatttctactaagtgtagatggacgcgcgagttaatgatc

SEQ ID NO: 1277 - RNA, 41 nt, synthetic construct
  misc_feature 1..41: note = Description of Artificial Sequence: Synthetic oligonucleotide
  source 1..41: mol_type = other RNA
taatttctactaagtgtagatcgtaagtccagcgaagctcg

SEQ ID NO: 1278 - RNA, 41 nt, synthetic construct
  misc_feature 1..41: note = Description of Artificial Sequence: Synthetic oligonucleotide
  source 1..41: mol_type = other RNA
taatttctactaagtgtagataagatcattaactcgcgcgt

SEQ ID NO: 1279 - RNA, 41 nt, synthetic construct
  misc_feature 1..41: note = Description of Artificial Sequence: Synthetic oligonucleotide
  source 1..41: mol_type = other RNA
taatttctactaagtgtagatcgcgtagttgcgatgcggtg

SEQ ID NO: 1280 - RNA, 41 nt, synthetic construct
  misc_feature 1..41: note = Description of Artificial Sequence: Synthetic oligonucleotide
  source 1..41: mol_type = other RNA
taatttctactaagtgtagatgcagtccccgacgcgataaa

SEQ ID NO: 1281 - RNA, 41 nt, synthetic construct
  misc_feature 1..41: note = Description of Artificial Sequence: Synthetic oligonucleotide
  source 1..41: mol_type = other RNA
taatttctactaagtgtagatgacgcgataaaacgcaacct

SEQ ID NO: 1282 - RNA, 41 nt, synthetic construct
  misc_feature 1..41: note = Description of Artificial Sequence: Synthetic oligonucleotide
  source 1..41: mol_type = other RNA
taatttctactaagtgtagatgcggaccgacgcatgacgtg

SEQ ID NO: 1283 - RNA, 41 nt, synthetic construct
  misc_feature 1..41: note = Description of Artificial Sequence: Synthetic oligonucleotide
  source 1..41: mol_type = other RNA
taatttctactaagtgtagatagcggaccgacgcatgacgt

SEQ ID NO: 1284 - RNA, 41 nt, synthetic construct
  misc_feature 1..41: note = Description of Artificial Sequence: Synthetic oligonucleotide
  source 1..41: mol_type = other RNA
taatttctactaagtgtagatcgcgacttagcacgcaaata

SEQ ID NO: 1285 - RNA, 41 nt, synthetic construct
  misc_feature 1..41: note = Description of Artificial Sequence: Synthetic oligonucleotide
  source 1..41: mol_type = other RNA
taatttctactaagtgtagatctcgcggtattgcgtctcat

SEQ ID NO: 1286 - RNA, 41 nt, synthetic construct
  misc_feature 1..41: note = Description of Artificial Sequence: Synthetic oligonucleotide
  source 1..41: mol_type = other RNA
taatttctactaagtgtagatgctcgttgcgggacttaacc

SEQ ID NO: 1287 - RNA, 41 nt, synthetic construct
  misc_feature 1..41: note = Description of Artificial Sequence: Synthetic oligonucleotide
  source 1..41: mol_type = other RNA
taatttctactaagtgtagatgaccgtactccccaggcggt

SEQ ID NO: 1288 - RNA, 41 nt, synthetic construct
  misc_feature 1..41: note = Description of Artificial Sequence: Synthetic oligonucleotide
  source 1..41: mol_type = other RNA
taatttctactaagtgtagatgcgtcgaaggtataccggta

SEQ ID NO: 1289 - RNA, 41 nt, synthetic construct
  misc_feature 1..41: note = Description of Artificial Sequence: Synthetic oligonucleotide
  source 1..41: mol_type = other RNA
taatttctactaagtgtagatgactgcgataagctacgggg

SEQ ID NO: 1290 - RNA, 41 nt, synthetic construct
  misc_feature 1..41: note = Description of Artificial Sequence: Synthetic oligonucleotide
  source 1..41: mol_type = other RNA
taatttctactaagtgtagatatgttgcccgtaccgtaaac

SEQ ID NO: 1291 - RNA, 41 nt, synthetic construct
  misc_feature 1..41: note = Description of Artificial Sequence: Synthetic oligonucleotide
  source 1..41: mol_type = other RNA
taatttctactaagtgtagatacggtacctaaggaataagc

SEQ ID NO: 1292 - RNA, 41 nt, synthetic construct
  misc_feature 1..41: note = Description of Artificial Sequence: Synthetic oligonucleotide
  source 1..41: mol_type = other RNA
taatttctactaagtgtagataataagtgatcgattgagcc

SEQ ID NO: 1293 - RNA, 41 nt, synthetic construct
  misc_feature 1..41: note = Description of Artificial Sequence: Synthetic oligonucleotide
  source 1..41: mol_type = other RNA
taatttctactaagtgtagatgaagtggattagtggcgcac

SEQ ID NO: 1294 - RNA, 41 nt, synthetic construct
  misc_feature 1..41: note = Description of Artificial Sequence: Synthetic oligonucleotide
  source 1..41: mol_type = other RNA
taatttctactaagtgtagatctgtatcgcgcgcctttcca

SEQ ID NO: 1295 - RNA, 41 nt, synthetic construct
  misc_feature 1..41: note = Description of Artificial Sequence: Synthetic oligonucleotide
  source 1..41: mol_type = other RNA
taatttctactaagtgtagattatcgcgcgcctttccagac

SEQ ID NO: 1296 - RNA, 41 nt, synthetic construct
  misc_feature 1..41: note = Description of Artificial Sequence: Synthetic oligonucleotide
  source 1..41: mol_type = other RNA
taatttctactaagtgtagattgtcaccctgtatcgcgcgc

SEQ ID NO: 1297 - RNA, 41 nt, synthetic construct
  misc_feature 1..41: note = Description of Artificial Sequence: Synthetic oligonucleotide
  source 1..41: mol_type = other RNA
taatttctactaagtgtagatatcgtatacgcgctgtatct

SEQ ID NO: 1298 - RNA, 41 nt, synthetic construct
  misc_feature 1..41: note = Description of Artificial Sequence: Synthetic oligonucleotide
  source 1..41: mol_type = other RNA
taatttctactaagtgtagatgccatcgcgttgtcatacga

SEQ ID NO: 1299 - RNA, 41 nt, synthetic construct
  misc_feature 1..41: note = Description of Artificial Sequence: Synthetic oligonucleotide
  source 1..41: mol_type = other RNA
taatttctactaagtgtagatgtcgctccgtataggccagt

SEQ ID NO: 1300 - RNA, 41 nt, synthetic construct
  misc_feature 1..41: note = Description of Artificial Sequence: Synthetic oligonucleotide
  source 1..41: mol_type = other RNA
taatttctactaagtgtagatagccatcgcgttgtcatacg

SEQ ID NO: 1301 - RNA, 41 nt, synthetic construct
  misc_feature 1..41: note = Description of Artificial Sequence: Synthetic oligonucleotide
  source 1..41: mol_type = other RNA
taatttctactaagtgtagatcggagcgttgtcgtaacagt

SEQ ID NO: 1302 - RNA, 41 nt, synthetic construct
  misc_feature 1..41: note = Description of Artificial Sequence: Synthetic oligonucleotide
  source 1..41: mol_type = other RNA
taatttctactaagtgtagatgcgttgggtgtggatcacta

SEQ ID NO: 1303 - RNA, 41 nt, synthetic construct
  misc_feature 1..41: note = Description of Artificial Sequence: Synthetic oligonucleotide
  source 1..41: mol_type = other RNA
taatttctactaagtgtagatctcttaaaacgatagtggct

SEQ ID NO: 1304 - RNA, 41 nt, synthetic construct
  misc_feature 1..41: note = Description of Artificial Sequence: Synthetic oligonucleotide
  source 1..41: mol_type = other RNA
taatttctactaagtgtagataaaaacttcgcgcaaaaacc

SEQ ID NO: 1305 - RNA, 41 nt, synthetic construct
  misc_feature 1..41: note = Description of Artificial Sequence: Synthetic oligonucleotide
  source 1..41: mol_type = other RNA
taatttctactaagtgtagattgatcatgactctccatatg

SEQ ID NO: 1306 - RNA, 41 nt, synthetic construct
  misc_feature 1..41: note = Description of Artificial Sequence: Synthetic oligonucleotide
  source 1..41: mol_type = other RNA
taatttctactaagtgtagattccacctgttttttaccatg

SEQ ID NO: 1307 - RNA, 41 nt, synthetic construct
  misc_feature 1..41: note = Description of Artificial Sequence: Synthetic oligonucleotide
  source 1..41: mol_type = other RNA
taatttctactaagtgtagataatagcgcggtttgacttac

SEQ ID NO: 1308 - RNA, 41 nt, synthetic construct
  misc_feature 1..41: note = Description of Artificial Sequence: Synthetic oligonucleotide
  source 1..41: mol_type = other RNA
taatttctactaagtgtagatgtgcgaccccaatagcgcgg

SEQ ID NO: 1309 - RNA, 41 nt, synthetic construct
  misc_feature 1..41: note = Description of Artificial Sequence: Synthetic oligonucleotide
  source 1..41: mol_type = other RNA
taatttctactaagtgtagatggttaacccaatcggcttca

SEQ ID NO: 1310 - RNA, 41 nt, synthetic construct
  misc_feature 1..41: note = Description of Artificial Sequence: Synthetic oligonucleotide
  source 1..41: mol_type = other RNA
taatttctactaagtgtagatacgggggccgcacaagcggt

SEQ ID NO: 1311 - RNA, 41 nt, synthetic construct
  misc_feature 1..41: note = Description of Artificial Sequence: Synthetic oligonucleotide
  source 1..41: mol_type = other RNA
taatttctactaagtgtagatgggataactccgggaaaccg

SEQ ID NO: 1312 - RNA, 41 nt, synthetic construct
  misc_feature 1..41: note = Description of Artificial Sequence: Synthetic oligonucleotide
  source 1..41: mol_type = other RNA
taatttctactaagtgtagataacgaacggaggaagagctt

SEQ ID NO: 1313 - RNA, 41 nt, synthetic construct
  misc_feature 1..41: note = Description of Artificial Sequence: Synthetic oligonucleotide
  source 1..41: mol_type = other RNA
taatttctactaagtgtagatagtcggatagtatccttacg

SEQ ID NO: 1314 - RNA, 41 nt, synthetic construct
  misc_feature 1..41: note = Description of Artificial Sequence: Synthetic oligonucleotide
  source 1..41: mol_type = other RNA
taatttctactaagtgtagatagcggaaaaagcggagccgt

SEQ ID NO: 1315 - RNA, 41 nt, synthetic construct
  misc_feature 1..41: note = Description of Artificial Sequence: Synthetic oligonucleotide
  source 1..41: mol_type = other RNA
taatttctactaagtgtagataagacggtaacagcccggta

SEQ ID NO: 1316 - RNA, 41 nt, synthetic construct
  misc_feature 1..41: note = Description of Artificial Sequence: Synthetic oligonucleotide
  source 1..41: mol_type = other RNA
taatttctactaagtgtagatatctaccggatctaccggat

SEQ ID NO: 1317 - RNA, 41 nt, synthetic construct
  misc_feature 1..41: note = Description of Artificial Sequence: Synthetic oligonucleotide
  source 1..41: mol_type = other RNA
taatttctactaagtgtagatgtagatccggtagatccggt

SEQ ID NO: 1318 - RNA, 41 nt, synthetic construct
  misc_feature 1..41: note = Description of Artificial Sequence: Synthetic oligonucleotide
  source 1..41: mol_type = other RNA
taatttctactaagtgtagatgcttaaccggggagggtcat

SEQ ID NO: 1319 - RNA, 41 nt, synthetic construct
  misc_feature 1..41: note = Description of Artificial Sequence: Synthetic oligonucleotide
  source 1..41: mol_type = other RNA
taatttctactaagtgtagatacaacgctcgcaccctacgt

SEQ ID NO: 1320 - RNA, 41 nt, synthetic construct
  misc_feature 1..41: note = Description of Artificial Sequence: Synthetic oligonucleotide
  source 1..41: mol_type = other RNA
taatttctactaagtgtagatcgtcgccttggtaggccgtc

SEQ ID NO: 1321 - RNA, 41 nt, synthetic construct
  misc_feature 1..41: note = Description of Artificial Sequence: Synthetic oligonucleotide
  source 1..41: mol_type = other RNA
taatttctactaagtgtagatcgtcaatccgagagaacccg

SEQ ID NO: 1322 - RNA, 41 nt, synthetic construct
  misc_feature 1..41: note = Description of Artificial Sequence: Synthetic oligonucleotide
  source 1..41: mol_type = other RNA
taatttctactaagtgtagatgatgaccgatagcggattag

SEQ ID NO: 1323 - RNA, 41 nt, synthetic construct
  misc_feature 1..41: note = Description of Artificial Sequence: Synthetic oligonucleotide
  source 1..41: mol_type = other RNA
taatttctactaagtgtagattcaaccgagcgtggatccga

SEQ ID NO: 1324 - RNA, 41 nt, synthetic construct
  misc_feature 1..41: note = Description of Artificial Sequence: Synthetic oligonucleotide
  source 1..41: mol_type = other RNA
taatttctactaagtgtagatgcacgagtgatgtcgtgcta

SEQ ID NO: 1325 - RNA, 41 nt, synthetic construct
  misc_feature 1..41: note = Description of Artificial Sequence: Synthetic oligonucleotide
  source 1..41: mol_type = other RNA
taatttctactaagtgtagatagcggccgatatctgattag

SEQ ID NO: 1326 - RNA, 41 nt, synthetic construct
  misc_feature 1..41: note = Description of Artificial Sequence: Synthetic oligonucleotide
  source 1..41: mol_type = other RNA
taatttctactaagtgtagattcgggccttgcgctattcga

SEQ ID NO: 1327 - RNA, 41 nt, synthetic construct
  misc_feature 1..41: note = Description of Artificial Sequence: Synthetic oligonucleotide
  source 1..41: mol_type = other RNA
taatttctactaagtgtagatacatgtacggaatcctccgg

SEQ ID NO: 1328 - RNA, 41 nt, synthetic construct
  misc_feature 1..41: note = Description of Artificial Sequence: Synthetic oligonucleotide
  source 1..41: mol_type = other RNA
taatttctactaagtgtagattacgtaataactgtcgagat

SEQ ID NO: 1329 - RNA, 41 nt, synthetic construct
  misc_feature 1..41: note = Description of Artificial Sequence: Synthetic oligonucleotide
  source 1..41: mol_type = other RNA
taatttctactaagtgtagatcaacagcggtactaagcgta

SEQ ID NO: 1330 - RNA, 41 nt, synthetic construct
  misc_feature 1..41: note = Description of Artificial Sequence: Synthetic oligonucleotide
  source 1..41: mol_type = other RNA
taatttctactaagtgtagatacagcggtactaagcgtacg

SEQ ID NO: 1331 - RNA, 41 nt, synthetic construct
  misc_feature 1..41: note = Description of Artificial Sequence: Synthetic oligonucleotide
  source 1..41: mol_type = other RNA
taatttctactaagtgtagatcgtacacaaaagcgcatgtg

SEQ ID NO: 1332 - RNA, 41 nt, synthetic construct
  misc_feature 1..41: note = Description of Artificial Sequence: Synthetic oligonucleotide
  source 1..41: mol_type = other RNA
taatttctactaagtgtagattacacaaaagcgcatgtgct

SEQ ID NO: 1333 - RNA, 41 nt, synthetic construct
  misc_feature 1..41: note = Description of Artificial Sequence: Synthetic oligonucleotide
  source 1..41: mol_type = other RNA
taatttctactaagtgtagatagagcctgaatcagcatgtg

SEQ ID NO: 1334 - RNA, 41 nt, synthetic construct
  misc_feature 1..41: note = Description of Artificial Sequence: Synthetic oligonucleotide
  source 1..41: mol_type = other RNA
taatttctactaagtgtagattcgcgtagtcggaatcttcg

SEQ ID NO: 1335 - RNA, 41 nt, synthetic construct
  misc_feature 1..41: note = Description of Artificial Sequence: Synthetic oligonucleotide
  source 1..41: mol_type = other RNA
taatttctactaagtgtagatatacacggtcgatttcgttc

SEQ ID NO: 1336 - RNA, 41 nt, synthetic construct
  misc_feature 1..41: note = Description of Artificial Sequence: Synthetic oligonucleotide
  source 1..41: mol_type = other RNA
taatttctactaagtgtagataacggttctgaaccgcaccc

SEQ ID NO: 1337 - RNA, 41 nt, synthetic construct
  misc_feature 1..41: note = Description of Artificial Sequence: Synthetic oligonucleotide
  source 1..41: mol_type = other RNA
taatttctactaagtgtagatgatacgggatcgataattgc

SEQ ID NO: 1338 - RNA, 41 nt, synthetic construct
  misc_feature 1..41: note = Description of Artificial Sequence: Synthetic oligonucleotide
  source 1..41: mol_type = other RNA
taatttctactaagtgtagatccgtattcttacccaccgta

SEQ ID NO: 1339 - RNA, 41 nt, synthetic construct
  misc_feature 1..41: note = Description of Artificial Sequence: Synthetic oligonucleotide
  source 1..41: mol_type = other RNA
taatttctactaagtgtagatcgccgtattcttacccaccg

SEQ ID NO: 1340 - RNA, 41 nt, synthetic construct
  misc_feature 1..41: note = Description of Artificial Sequence: Synthetic oligonucleotide
  source 1..41: mol_type = other RNA
taatttctactaagtgtagatacggcagcacccacgcggca

SEQ ID NO: 1341 - RNA, 41 nt, synthetic construct
  misc_feature 1..41: note = Description of Artificial Sequence: Synthetic oligonucleotide
  source 1..41: mol_type = other RNA
taatttctactaagtgtagatggctacaggagctgtcggta

SEQ ID NO: 1342 - RNA, 41 nt, synthetic construct
  misc_feature 1..41: note = Description of Artificial Sequence: Synthetic oligonucleotide
  source 1..41: mol_type = other RNA
taatttctactaagtgtagattactccctctttacgcgcag

SEQ ID NO: 1343 - RNA, 41 nt, synthetic construct
  misc_feature 1..41: note = Description of Artificial Sequence: Synthetic oligonucleotide
  source 1..41: mol_type = other RNA
taatttctactaagtgtagattagtagcgaatgctgaagtt

SEQ ID NO: 1344 - RNA, 41 nt, synthetic construct
  misc_feature 1..41: note = Description of Artificial Sequence: Synthetic oligonucleotide
  source 1..41: mol_type = other RNA
taatttctactaagtgtagatgtagcgaatgctgaagttga

SEQ ID NO: 1345 - RNA, 41 nt, synthetic construct
  misc_feature 1..41: note = Description of Artificial Sequence: Synthetic oligonucleotide
  source 1..41: mol_type = other RNA
taatttctactaagtgtagataagttgataacccactaagt

SEQ ID NO: 1346 - RNA, 41 nt, synthetic construct
  misc_feature 1..41: note = Description of Artificial Sequence: Synthetic oligonucleotide
  source 1..41: mol_type = other RNA
taatttctactaagtgtagattaagcgaagcgccatcaggc

SEQ ID NO: 1347 - RNA, 41 nt, synthetic construct
  misc_feature 1..41: note = Description of Artificial Sequence: Synthetic oligonucleotide
  source 1..41: mol_type = other RNA
taatttctactaagtgtagatgcgaatcaatacagaatgcc

SEQ ID NO: 1348 - RNA, 41 nt, synthetic construct
  misc_feature 1..41: note = Description of Artificial Sequence: Synthetic oligonucleotide
  source 1..41: mol_type = other RNA
taatttctactaagtgtagatattgttagcgaatcaataca

SEQ ID NO: 1349 - RNA, 41 nt, synthetic construct
  misc_feature 1..41: note = Description of Artificial Sequence: Synthetic oligonucleotide
  source 1..41: mol_type = other RNA
taatttctactaagtgtagatcgttacaataagcctggtgg

SEQ ID NO: 1350 - RNA, 41 nt, synthetic construct
  misc_feature 1..41: note = Description of Artificial Sequence: Synthetic oligonucleotide
  source 1..41: mol_type = other RNA
taatttctactaagtgtagatcccacgttacaataagcctg

SEQ ID NO: 1351 - RNA, 41 nt, synthetic construct
  misc_feature 1..41: note = Description of Artificial Sequence: Synthetic oligonucleotide
  source 1..41: mol_type = other RNA
taatttctactaagtgtagatcacgttacaataagcctggt

SEQ ID NO: 1352 - RNA, 41 nt, synthetic construct
  misc_feature 1..41: note = Description of Artificial Sequence: Synthetic oligonucleotide
  source 1..41: mol_type = other RNA
taatttctactaagtgtagattcactccctctggccgcaga

SEQ ID NO: 1353 - RNA, 41 nt, synthetic construct
  misc_feature 1..41: note = Description of Artificial Sequence: Synthetic oligonucleotide
  source 1..41: mol_type = other RNA
taatttctactaagtgtagatggcagccgtcactccctctg

SEQ ID NO: 1354 - RNA, 41 nt, synthetic construct
  misc_feature 1..41: note = Description of Artificial Sequence: Synthetic oligonucleotide
  source 1..41: mol_type = other RNA
taatttctactaagtgtagatgcccggcagccgtcactccc

SEQ ID NO: 1355 - RNA, 41 nt, synthetic construct
  misc_feature 1..41: note = Description of Artificial Sequence: Synthetic oligonucleotide
  source 1..41: mol_type = other RNA
taatttctactaagtgtagatggcattctgggatcagatac

SEQ ID NO: 1356 - RNA, 41 nt, synthetic construct
  misc_feature 1..41: note = Description of Artificial Sequence: Synthetic oligonucleotide
  source 1..41: mol_type = other RNA
taatttctactaagtgtagatgggcattctgggatcagata

SEQ ID NO: 1357 - RNA, 41 nt, synthetic construct
  misc_feature 1..41: note = Description of Artificial Sequence: Synthetic oligonucleotide
  source 1..41: mol_type = other RNA
taatttctactaagtgtagatgatacgtaaatatcaggcga

SEQ ID NO: 1358 - RNA, 41 nt, synthetic construct
  misc_feature 1..41: note = Description of Artificial Sequence: Synthetic oligonucleotide
  source 1..41: mol_type = other RNA
taatttctactaagtgtagatgacgtaggcgcgagcttctt

SEQ ID NO: 1359 - RNA, 41 nt, synthetic construct
  misc_feature 1..41: note = Description of Artificial Sequence: Synthetic oligonucleotide
  source 1..41: mol_type = other RNA
taatttctactaagtgtagatatcaaacgattgcggagcaa

SEQ ID NO: 1360 - RNA, 41 nt, synthetic construct
  misc_feature 1..41: note = Description of Artificial Sequence: Synthetic oligonucleotide
  source 1..41: mol_type = other RNA
taatttctactaagtgtagatcagggggagccgttgaacgt

SEQ ID NO: 1361 - RNA, 41 nt, synthetic construct
  misc_feature 1..41: note = Description of Artificial Sequence: Synthetic oligonucleotide
  source 1..41: mol_type = other RNA
taatttctactaagtgtagatgttttttaactcgccgccag

SEQ ID NO: 1362 - RNA, 41 nt, synthetic construct
  misc_feature 1..41: note = Description of Artificial Sequence: Synthetic oligonucleotide
  source 1..41: mol_type = other RNA
taatttctactaagtgtagatcggtcatcaagaacctgcca

SEQ ID NO: 1363 - RNA, 41 nt, synthetic construct
  misc_feature 1..41: note = Description of Artificial Sequence: Synthetic oligonucleotide
  source 1..41: mol_type = other RNA
taatttctactaagtgtagatgccaccgctgtttaaatcgt

SEQ ID NO: 1364 - RNA, 41 nt, synthetic construct
  misc_feature 1..41: note = Description of Artificial Sequence: Synthetic oligonucleotide
  source 1..41: mol_type = other RNA
taatttctactaagtgtagataatacgttgttggattgacg

SEQ ID NO: 1365 - RNA, 41 nt, synthetic construct
  misc_feature 1..41: note = Description of Artificial Sequence: Synthetic oligonucleotide
  source 1..41: mol_type = other RNA
taatttctactaagtgtagatgaccaaagtgggggacctta

SEQ ID NO: 1366 - RNA, 41 nt, synthetic construct
  misc_feature 1..41: note = Description of Artificial Sequence: Synthetic oligonucleotide
  source 1..41: mol_type = other RNA
taatttctactaagtgtagatttggattgacgttactcgca

SEQ ID NO: 1367 - RNA, 41 nt, synthetic construct
  misc_feature 1..41: note = Description of Artificial Sequence: Synthetic oligonucleotide
  source 1..41: mol_type = other RNA
taatttctactaagtgtagatatatgaagcgttataaccga

SEQ ID NO: 1368 - RNA, 41 nt, synthetic construct
  misc_feature 1..41: note = Description of Artificial Sequence: Synthetic oligonucleotide
  source 1..41: mol_type = other RNA
taatttctactaagtgtagatttagatgaatacatagtcta

SEQ ID NO: 1369 - RNA, 41 nt, synthetic construct
  misc_feature 1..41: note = Description of Artificial Sequence: Synthetic oligonucleotide
  source 1..41: mol_type = other RNA
taatttctactaagtgtagatagagtctgaatcagtttgtg

SEQ ID NO: 1370 - RNA, 41 nt, synthetic construct
  misc_feature 1..41: note = Description of Artificial Sequence: Synthetic oligonucleotide
  source 1..41: mol_type = other RNA
taatttctactaagtgtagatctggaaacggtggctaatac

SEQ ID NO: 1371 - RNA, 41 nt, synthetic construct
  misc_feature 1..41: note = Description of Artificial Sequence: Synthetic oligonucleotide
  source 1..41: mol_type = other RNA
taatttctactaagtgtagatgaaacggtggctaataccgc

SEQ ID NO: 1372 - RNA, 41 nt, synthetic construct
  misc_feature 1..41: note = Description of Artificial Sequence: Synthetic oligonucleotide
  source 1..41: mol_type = other RNA
taatttctactaagtgtagatggccttgcgctatcggatat

SEQ ID NO: 1373 - RNA, 41 nt, synthetic construct
  misc_feature 1..41: note = Description of Artificial Sequence: Synthetic oligonucleotide
  source 1..41: mol_type = other RNA
taatttctactaagtgtagatggaaattgcccggtagaggg

SEQ ID NO: 1374 - RNA, 41 nt, synthetic construct
  misc_feature 1..41: note = Description of Artificial Sequence: Synthetic oligonucleotide
  source 1..41: mol_type = other RNA
taatttctactaagtgtagattgtttgccagcacgtaatgg

SEQ ID NO: 1375 - RNA, 41 nt, synthetic construct
  misc_feature 1..41: note = Description of Artificial Sequence: Synthetic oligonucleotide
  source 1..41: mol_type = other RNA
taatttctactaagtgtagattgtcgcggactcttaaccgt

SEQ ID NO: 1376 - RNA, 41 nt, synthetic construct
  misc_feature 1..41: note = Description of Artificial Sequence: Synthetic oligonucleotide
  source 1..41: mol_type = other RNA
taatttctactaagtgtagatattgagccgcggtggttacg

SEQ ID NO: 1377 - RNA, 41 nt, synthetic construct
  misc_feature 1..41: note = Description of Artificial Sequence: Synthetic oligonucleotide
  source 1..41: mol_type = other RNA
taatttctactaagtgtagatagagggactgtcaacgcgcg

SEQ ID NO: 1378 - RNA, 41 nt, synthetic construct
  misc_feature 1..41: note = Description of Artificial Sequence: Synthetic oligonucleotide
  source 1..41: mol_type = other RNA
taatttctactaagtgtagatatagcgtattcgtttgacgt

SEQ ID NO: 1379 - RNA, 41 nt, synthetic construct
  misc_feature 1..41: note = Description of Artificial Sequence: Synthetic oligonucleotide
  source 1..41: mol_type = other RNA
taatttctactaagtgtagatataccgcatgatgcctacgg

SEQ ID NO: 1380 - RNA, 41 nt, synthetic construct
  misc_feature 1..41: note = Description of Artificial Sequence: Synthetic oligonucleotide
  source 1..41: mol_type = other RNA
taatttctactaagtgtagataaactggcagactagagtgc

SEQ ID NO: 1381 - RNA, 41 nt, synthetic construct
  misc_feature 1..41: note = Description of Artificial Sequence: Synthetic oligonucleotide
  source 1..41: mol_type = other RNA
taatttctactaagtgtagatagagaatctagcggagacgc

SEQ ID NO: 1382 - RNA, 41 nt, synthetic construct
  misc_feature 1..41: note = Description of Artificial Sequence: Synthetic oligonucleotide
  source 1..41: mol_type = other RNA
taatttctactaagtgtagattggctttcggagctaacgcg

SEQ ID NO: 1383 - RNA, 41 nt, synthetic construct
  misc_feature 1..41: note = Description of Artificial Sequence: Synthetic oligonucleotide
  source 1..41: mol_type = other RNA
taatttctactaagtgtagattcgggcctctcgcgtcagga

SEQ ID NO: 1384 - RNA, 41 nt, synthetic construct
  misc_feature 1..41: note = Description of Artificial Sequence: Synthetic oligonucleotide
  source 1..41: mol_type = other RNA
taatttctactaagtgtagatggcgccatagtctctggata

SEQ ID NO: 1385 - RNA, 41 nt, synthetic construct
  misc_feature 1..41: note = Description of Artificial Sequence: Synthetic oligonucleotide
  source 1..41: mol_type = other RNA
taatttctactaagtgtagatcgtagttgacgatgcatgtt

SEQ ID NO: 1386 - RNA, 41 nt, synthetic construct
  misc_feature 1..41: note = Description of Artificial Sequence: Synthetic oligonucleotide
  source 1..41: mol_type = other RNA
taatttctactaagtgtagataatgaagcgaaccgggagaa

SEQ ID NO: 1387 - RNA, 41 nt, synthetic construct
  misc_feature 1..41: note = Description of Artificial Sequence: Synthetic oligonucleotide
  source 1..41: mol_type = other RNA
taatttctactaagtgtagatcgcgtagaatccgtacggcc

SEQ ID NO: 1388 - RNA, 41 nt, synthetic construct
  misc_feature 1..41: note = Description of Artificial Sequence: Synthetic oligonucleotide
  source 1..41: mol_type = other RNA
taatttctactaagtgtagatgacggccgtacggattctac

SEQ ID NO: 1389 - RNA, 41 nt, synthetic construct
  misc_feature 1..41: note = Description of Artificial Sequence: Synthetic oligonucleotide
  source 1..41: mol_type = other RNA
taatttctactaagtgtagatgctgactggaacgtcgtacg

SEQ ID NO: 1390 - RNA, 41 nt, synthetic construct
  misc_feature 1..41: note = Description of Artificial Sequence: Synthetic oligonucleotide
  source 1..41: mol_type = other RNA
taatttctactaagtgtagattggatgggatacatagtaag

SEQ ID NO: 1391 - RNA, 41 nt, synthetic construct
  misc_feature 1..41: note = Description of Artificial Sequence: Synthetic oligonucleotide
  source 1..41: mol_type = other RNA
taatttctactaagtgtagatctctattccatataccgttt

SEQ ID NO: 1392 - RNA, 41 nt, synthetic construct
  misc_feature 1..41: note = Description of Artificial Sequence: Synthetic oligonucleotide
  source 1..41: mol_type = other RNA
taatttctactaagtgtagatatacgtaaataacatacctg

SEQ ID NO: 1393 - RNA, 41 nt, synthetic construct
  misc_feature 1..41: note = Description of Artificial Sequence: Synthetic oligonucleotide
  source 1..41: mol_type = other RNA
taatttctactaagtgtagatttttatggcagacgataatc

SEQ ID NO: 1394 - RNA, 41 nt, synthetic construct
  misc_feature 1..41: note = Description of Artificial Sequence: Synthetic oligonucleotide
  source 1..41: mol_type = other RNA
taatttctactaagtgtagataaaattttcaacacctcctg

SEQ ID NO: 1395 - RNA, 41 nt, synthetic construct
  misc_feature 1..41: note = Description of Artificial Sequence: Synthetic oligonucleotide
  source 1..41: mol_type = other RNA
taatttctactaagtgtagatacaaagagcattacataatc

SEQ ID NO: 1396 - RNA, 41 nt, synthetic construct
  misc_feature 1..41: note = Description of Artificial Sequence: Synthetic oligonucleotide
  source 1..41: mol_type = other RNA
taatttctactaagtgtagatcacctcctgatttttctacc

SEQ ID NO: 1397 - RNA, 41 nt, synthetic construct
  misc_feature 1..41: note = Description of Artificial Sequence: Synthetic oligonucleotide
  source 1..41: mol_type = other RNA
taatttctactaagtgtagattcctatggggtggggttgta

SEQ ID NO: 1398 - RNA, 41 nt, synthetic construct
  misc_feature 1..41: note = Description of Artificial Sequence: Synthetic oligonucleotide
  source 1..41: mol_type = other RNA
taatttctactaagtgtagatatatgatgggaacctaggga

SEQ ID NO: 1399 - RNA, 41 nt, synthetic construct
  misc_feature 1..41: note = Description of Artificial Sequence: Synthetic oligonucleotide
  source 1..41: mol_type = other RNA
taatttctactaagtgtagatgtatgtagtagtagacacga

SEQ ID NO: 1400 - RNA, 41 nt, synthetic construct
  misc_feature 1..41: note = Description of Artificial Sequence: Synthetic oligonucleotide
  source 1..41: mol_type = other RNA
taatttctactaagtgtagatggttcgccttgaagactgtt

SEQ ID NO: 1401 - RNA, 41 nt, synthetic construct
  misc_feature 1..41: note = Description of Artificial Sequence: Synthetic oligonucleotide
  source 1..41: mol_type = other RNA
taatttctactaagtgtagataagactgttttactagaatg

SEQ ID NO: 1402 - RNA, 41 nt, synthetic construct
  misc_feature 1..41: note = Description of Artificial Sequence: Synthetic oligonucleotide
  source 1..41: mol_type = other RNA
taatttctactaagtgtagattaagggaagaaaaaatagag

SEQ ID NO: 1403 - RNA, 41 nt, synthetic construct
  misc_feature 1..41: note = Description of Artificial Sequence: Synthetic oligonucleotide
  source 1..41: mol_type = other RNA
taatttctactaagtgtagatatgctctaccgtgatctcta

SEQ ID NO: 1404 - RNA, 41 nt, synthetic construct
  misc_feature 1..41: note = Description of Artificial Sequence: Synthetic oligonucleotide
  source 1..41: mol_type = other RNA
taatttctactaagtgtagatgagagatacgaatcatactt

SEQ ID NO: 1405 - RNA, 41 nt, synthetic construct
  misc_feature 1..41: note = Description of Artificial Sequence: Synthetic oligonucleotide
  source 1..41: mol_type = other RNA
taatttctactaagtgtagatagtagcaactgcaactgata

SEQ ID NO: 1406 - RNA, 41 nt, synthetic construct
  misc_feature 1..41: note = Description of Artificial Sequence: Synthetic oligonucleotide
  source 1..41: mol_type = other RNA
taatttctactaagtgtagattaggactttttaagagttag

SEQ ID NO: 1407 - RNA, 41 nt, synthetic construct
  misc_feature 1..41: note = Description of Artificial Sequence: Synthetic oligonucleotide
  source 1..41: mol_type = other RNA
taatttctactaagtgtagatcctgcgataagtttggggga

SEQ ID NO: 1408 - RNA, 41 nt, synthetic construct
  misc_feature 1..41: note = Description of Artificial Sequence: Synthetic oligonucleotide
  source 1..41: mol_type = other RNA
taatttctactaagtgtagattaatttatgcacagcagtca

SEQ ID NO: 1409 - RNA, 41 nt, synthetic construct
  misc_feature 1..41: note = Description of Artificial Sequence: Synthetic oligonucleotide
  source 1..41: mol_type = other RNA
taatttctactaagtgtagatgttcgtgccgtaaggtgttg

SEQ ID NO: 1410 - RNA, 41 nt, synthetic construct
  misc_feature 1..41: note = Description of Artificial Sequence: Synthetic oligonucleotide
  source 1..41: mol_type = other RNA
taatttctactaagtgtagatgtcgctagttactaacatta

SEQ ID NO: 1411 - RNA, 41 nt, synthetic construct
  misc_feature 1..41: note = Description of Artificial Sequence: Synthetic oligonucleotide
  source 1..41: mol_type = other RNA
taatttctactaagtgtagatctgttgtaagggaagaaaaa

SEQ ID NO: 1412 - RNA, 41 nt, synthetic construct
  misc_feature 1..41: note = Description of Artificial Sequence: Synthetic oligonucleotide
  source 1..41: mol_type = other RNA
taatttctactaagtgtagatacggaataaaagaatgggga

SEQ ID NO: 1413 - RNA, 41 nt, synthetic construct
  misc_feature 1..41: note = Description of Artificial Sequence: Synthetic oligonucleotide
  source 1..41: mol_type = other RNA
taatttctactaagtgtagatcagttggagctaaccaaaac

SEQ ID NO: 1414 - RNA, 41 nt, synthetic construct
  misc_feature 1..41: note = Description of Artificial Sequence: Synthetic oligonucleotide
  source 1..41: mol_type = other RNA
taatttctactaagtgtagattttgatctgccttaaaggta

SEQ ID NO: 1415 - RNA, 41 nt, synthetic construct
  misc_feature 1..41: note = Description of Artificial Sequence: Synthetic oligonucleotide
  source 1..41: mol_type = other RNA
taatttctactaagtgtagattgtaaagccgccctctcggc

SEQ ID NO: 1416 - RNA, 41 nt, synthetic construct
  misc_feature 1..41: note = Description of Artificial Sequence: Synthetic oligonucleotide
  source 1..41: mol_type = other RNA
taatttctactaagtgtagattaagcgcagcgccaccgggc

SEQ ID NO: 1417 - RNA, 41 nt, synthetic construct
  misc_feature 1..41: note = Description of Artificial Sequence: Synthetic oligonucleotide
  source 1..41: mol_type = other RNA
taatttctactaagtgtagatggtgagggcatcaggccgca

SEQ ID NO: 1418 - RNA, 41 nt, synthetic construct
  misc_feature 1..41: note = Description of Artificial Sequence: Synthetic oligonucleotide
  source 1..41: mol_type = other RNA
taatttctactaagtgtagatcagcgactcggattccgaca

SEQ ID NO: 1419 - RNA, 41 nt, synthetic construct
  misc_feature 1..41: note = Description of Artificial Sequence: Synthetic oligonucleotide
  source 1..41: mol_type = other RNA
taatttctactaagtgtagatagcccggacagatgcgcagc

SEQ ID NO: 1420 - RNA, 41 nt, synthetic construct
  misc_feature 1..41: note = Description of Artificial Sequence: Synthetic oligonucleotide
  source 1..41: mol_type = other RNA
taatttctactaagtgtagatcagtgactcggattcggaca

SEQ ID NO: 1421 - RNA, 41 nt, synthetic construct
  misc_feature 1..41: note = Description of Artificial Sequence: Synthetic oligonucleotide
  source 1..41: mol_type = other RNA
taatttctactaagtgtagatgttactctccggactccgca

SEQ ID NO: 1422 - RNA, 41 nt, synthetic construct
  misc_feature 1..41: note = Description of Artificial Sequence: Synthetic oligonucleotide
  source 1..41: mol_type = other RNA
taatttctactaagtgtagatcagccactctgccggtatgt

SEQ ID NO: 1423 - RNA, 41 nt, synthetic construct
  misc_feature 1..41: note = Description of Artificial Sequence: Synthetic oligonucleotide
  source 1..41: mol_type = other RNA
taatttctactaagtgtagatccccgctggcgcggggaaca

SEQ ID NO: 1424 - RNA, 41 nt, synthetic construct
  misc_feature 1..41: note = Description of Artificial Sequence: Synthetic oligonucleotide
  source 1..41: mol_type = other RNA
taatttctactaagtgtagatcaagctatgcatccatgcat

SEQ ID NO: 1425 - RNA, 41 nt, synthetic construct
  misc_feature 1..41: note = Description of Artificial Sequence: Synthetic oligonucleotide
  source 1..41: mol_type = other RNA
taatttctactaagtgtagatgttcgctctatcgaagggtg

SEQ ID NO: 1426 - RNA, 41 nt, synthetic construct
  misc_feature 1..41: note = Description of Artificial Sequence: Synthetic oligonucleotide
  source 1..41: mol_type = other RNA
taatttctactaagtgtagattacaagtcgcatttcggagc

SEQ ID NO: 1427 - RNA, 41 nt, synthetic construct
  misc_feature 1..41: note = Description of Artificial Sequence: Synthetic oligonucleotide
  source 1..41: mol_type = other RNA
taatttctactaagtgtagattcggtacgagatgagcccgc

SEQ ID NO: 1428 - RNA, 41 nt, synthetic construct
  misc_feature 1..41: note = Description of Artificial Sequence: Synthetic oligonucleotide
  source 1..41: mol_type = other RNA
taatttctactaagtgtagatatgtgagtcgccgcgaccga

SEQ ID NO: 1429 - RNA, 41 nt, synthetic construct
  misc_feature 1..41: note = Description of Artificial Sequence: Synthetic oligonucleotide
  source 1..41: mol_type = other RNA
taatttctactaagtgtagatacgactttcgtgccgtagct

SEQ ID NO: 1430 - RNA, 41 nt, synthetic construct
  misc_feature 1..41: note = Description of Artificial Sequence: Synthetic oligonucleotide
  source 1..41: mol_type = other RNA
taatttctactaagtgtagatagtctcgtagaggggggtag

SEQ ID NO: 1431 - RNA, 41 nt, synthetic construct
  misc_feature 1..41: note = Description of Artificial Sequence: Synthetic oligonucleotide
  source 1..41: mol_type = other RNA
taatttctactaagtgtagatgctgctttgctgacgagtgg

SEQ ID NO: 1432 - RNA, 41 nt, synthetic construct
  misc_feature 1..41: note = Description of Artificial Sequence: Synthetic oligonucleotide
  source 1..41: mol_type = other RNA
taatttctactaagtgtagataggcttcgggtcgggccgag

SEQ ID NO: 1433 - RNA, 41 nt, synthetic construct
  misc_feature 1..41: note = Description of Artificial Sequence: Synthetic oligonucleotide
  source 1..41: mol_type = other RNA
taatttctactaagtgtagatgctccggccagcaaaatcgc

SEQ ID NO: 1434 - RNA, 41 nt, synthetic construct
  misc_feature 1..41: note = Description of Artificial Sequence: Synthetic oligonucleotide
  source 1..41: mol_type = other RNA
taatttctactaagtgtagatgtcgggccgaggcagcgtcc

SEQ ID NO: 1435 - RNA, 41 nt, synthetic construct
  misc_feature 1..41: note = Description of Artificial Sequence: Synthetic oligonucleotide
  source 1..41: mol_type = other RNA
taatttctactaagtgtagataaccttcggggaacgataac

SEQ ID NO: 1436 - RNA, 41 nt, synthetic construct
  misc_feature 1..41: note = Description of Artificial Sequence: Synthetic oligonucleotide
  source 1..41: mol_type = other RNA
taatttctactaagtgtagatctcgcgtcaggatatgccta

SEQ ID NO: 1437 - RNA, 51 nt, synthetic construct
  misc_feature 1..51: note = Description of Artificial Sequence: Synthetic oligonucleotide
  source 1..51: mol_type = other RNA
ggccaccccaaaaatgaaggggactaaaacagtgataagtggaatgccatg

SEQ ID NO: 1438 - RNA, 51 nt, synthetic construct
  misc_feature 1..51: note = Description of Artificial Sequence: Synthetic oligonucleotide
  source 1..51: mol_type = other RNA
ggccaccccaaaaatgaaggggactaaaacacgacctactctcccatactc

SEQ ID NO: 1439 - RNA, 41 nt, synthetic construct
  misc_feature 1..41: note = Description of Artificial Sequence: Synthetic oligonucleotide
  source 1..41: mol_type = other RNA
taatttctactaagtgtagatcccccagcgcttcagcgttc

SEQ ID NO: 1440 - RNA, 41 nt, synthetic construct; identical to SEQ ID NO: 1439
  misc_feature 1..41: note = Description of Artificial Sequence: Synthetic oligonucleotide
  source 1..41: mol_type = other RNA

SEQ ID NO: 1441 - DNA, 46 bp, synthetic construct
  misc_feature 1..46: note = Description of Artificial Sequence: Synthetic oligonucleotide
  source 1..46: mol_type = other DNA
  modified_base 1: mod_base = OTHER; note = Nucleotide with phosphorothioate linkage
  modified_base 2: mod_base = OTHER; note = Nucleotide with phosphorothioate linkage
  modified_base 3: mod_base = OTHER; note = Nucleotide with phosphorothioate linkage
  modified_base 4: mod_base = OTHER; note = Nucleotide with phosphorothioate linkage
  modified_base 5: mod_base = OTHER; note = Nucleotide with phosphorothioate linkage
  misc_feature 1..5: note = DNA
  misc_feature 6..46: note = RNA
ttttttaatttctactaagtgtagatcccccagcgcttcagcgttc

SEQ ID NO: 1442 - DNA, 51 bp, synthetic construct
  misc_feature 1..51: note = Description of Artificial Sequence: Synthetic oligonucleotide
  source 1..51: mol_type = other DNA
  modified_base 1: mod_base = OTHER; note = Nucleotide with phosphorothioate linkage
  modified_base 2: mod_base = OTHER; note = Nucleotide with phosphorothioate linkage
  modified_base 3: mod_base = OTHER; note = Nucleotide with phosphorothioate linkage
  modified_base 4: mod_base = OTHER; note = Nucleotide with phosphorothioate linkage
  modified_base 5: mod_base = OTHER; note = Nucleotide with phosphorothioate linkage
  modified_base 6: mod_base = OTHER; note = Nucleotide with phosphorothioate linkage
  modified_base 7: mod_base = OTHER; note = Nucleotide with phosphorothioate linkage
  modified_base 8: mod_base = OTHER; note = Nucleotide with phosphorothioate linkage
  modified_base 9: mod_base = OTHER; note = Nucleotide with phosphorothioate linkage
  modified_base 10: mod_base = OTHER; note = Nucleotide with phosphorothioate linkage
  misc_feature 1..10: note = DNA
  misc_feature 11..51: note = RNA
tttttttttttaatttctactaagtgtagatcccccagcgcttcagcgttc

SEQ ID NO: 1443 - DNA, 42 bp, synthetic construct
  misc_feature 1..42: note = Description of Artificial Sequence: Synthetic oligonucleotide
  source 1..42: mol_type = other DNA
  modified_base 10: mod_base = OTHER; note = Internal Biotin modified deoxyuridine
  misc_feature 1..9: note = RNA
  misc_feature 10: note = DNA
  misc_feature 11..42: note = RNA
taatttctatctaagtgtagatcccccagcgcttcagcgttc

SEQ ID NO: 1444 - DNA, 42 bp, synthetic construct
  misc_feature 1..42: note = Description of Artificial Sequence: Synthetic oligonucleotide
  source 1..42: mol_type = other DNA
  modified_base 23: mod_base = OTHER; note = Internal Biotin modified deoxyuridine
  misc_feature 1..22: note = RNA
  misc_feature 23: note = DNA
  misc_feature 24..42: note = RNA
taatttctactaagtgtagatctccccagcgcttcagcgttc

SEQ ID NO: 1445 - DNA, 41 bp, synthetic construct
  misc_feature 1..41: note = Description of Artificial Sequence: Synthetic oligonucleotide
  source 1..41: mol_type = other DNA
  modified_base 8: mod_base = OTHER; note = Internal Biotin modified deoxyuridine
  misc_feature 1..7: note = RNA
  misc_feature 8: note = DNA
  misc_feature 9..41: note = RNA
taatttctactaagtgtagatcccccagcgcttcagcgttc

SEQ ID NO: 1446 - DNA, 41 bp, synthetic construct; identical to SEQ ID NO: 1445
  misc_feature 1..41: note = Description of Artificial Sequence: Synthetic oligonucleotide
  source 1..41: mol_type = other DNA
  modified_base 21: mod_base = OTHER; note = Internal Biotin modified deoxyuridine
  misc_feature 1..20: note = RNA
  misc_feature 21: note = DNA
  misc_feature 22..41: note = RNA

SEQ ID NO: 1447 - RNA, 41 nt, synthetic construct; identical to SEQ ID NO: 1439
  misc_feature 1..41: note = Description of Artificial Sequence: Synthetic oligonucleotide
  source 1..41: mol_type = other RNA

SEQ ID NO: 1448 - RNA, 41 nt, synthetic construct; identical to SEQ ID NO: 1439
  misc_feature 1..41: note = Description of Artificial Sequence: Synthetic oligonucleotide
  source 1..41: mol_type = other RNA

SEQ ID NO: 1449 - RNA, 41 nt, synthetic construct; identical to SEQ ID NO: 1439
  misc_feature 1..41: note = Description of Artificial Sequence: Synthetic oligonucleotide
  source 1..41: mol_type = other RNA

SEQ ID NO: 1450 - DNA, 16 bp, synthetic construct
  misc_feature 1..16: note = Description of Artificial Sequence: Synthetic oligonucleotide
  source 1..16: mol_type = other DNA
aatactacactagaga

SEQ ID NO: 1451 - DNA, 16 bp, synthetic construct
  misc_feature 1..16: note = Description of Artificial Sequence: Synthetic oligonucleotide
  source 1..16: mol_type = other DNA
atactacactagagaa

SEQ ID NO: 1452 - DNA, 14 bp, synthetic construct
  misc_feature 1..14: note = Description of Artificial Sequence: Synthetic oligonucleotide
  source 1..14: mol_type = other DNA
  modified_base 11: mod_base = OTHER; note = Internal Biotin modified nucleotide
ttattattattatt

SEQ ID NO: 1453 - DNA, 19 bp, synthetic construct
  misc_feature 1..19: note = Description of Artificial Sequence: Synthetic oligonucleotide
  source 1..19: mol_type = other DNA
  modified_base 1: mod_base = OTHER; note = Nucleotide with phosphorothioate linkage
  modified_base 2: mod_base = OTHER; note = Nucleotide with phosphorothioate linkage
  modified_base 3: mod_base = OTHER; note = Internal 6-Carboxyfluorescein  modified nucleotide with phosphorothioate linkage
ttttattattattattatt

SEQ ID NO: 1454 - DNA, 12 bp, synthetic construct
  misc_feature 1..12: note = Description of Artificial Sequence: Synthetic oligonucleotide
  source 1..12: mol_type = other DNA
ttattattatta

SEQ ID NO: 1455 - DNA, 30 bp, synthetic construct
  misc_feature 1..30: note = Description of Artificial Sequence: Synthetic oligonucleotide
  source 1..30: mol_type = other DNA
tttttttttttttttttttttttttttttt

SEQ ID NO: 1456 - DNA, 20 bp, synthetic construct
  misc_feature 1..20: note = Description of Artificial Sequence: Synthetic oligonucleotide
  source 1..20: mol_type = other DNA
tttttttttttttttttttt

SEQ ID NO: 1457 - DNA, 23 bp, synthetic construct
  misc_feature 1..23: note = Description of Artificial Sequence: Synthetic oligonucleotide
  source 1..23: mol_type = other DNA
  modified_base 1: mod_base = OTHER; note = Nucleotide with phosphorothioate linkage
  modified_base 2: mod_base = OTHER; note = Nucleotide with phosphorothioate linkage
  modified_base 3: mod_base = OTHER; note = Internal Fluorescein modified nucleotide with phosphorothioate linkage
ttttttttttttttttttttttt

SEQ ID NO: 1458 - DNA, 22 bp, synthetic construct
  misc_feature 1..22: note = Description of Artificial Sequence: Synthetic oligonucleotide
  source 1..22: mol_type = other DNA
  modified_base 20: mod_base = OTHER; note = Nucleotide with phosphorothioate linkage
  modified_base 21: mod_base = OTHER; note = Internal Biotin modified nucleotide with phosphorothioate linkage
tttttttttttttttttttttt

SEQ ID NO: 1459 - DNA, 23 bp, synthetic construct
  misc_feature 1..23: note = Description of Artificial Sequence: Synthetic oligonucleotide
  source 1..23: mol_type = other DNA
  modified_base 1: mod_base = OTHER; note = Nucleotide with phosphorothioate linkage
  modified_base 2: mod_base = OTHER; note = Nucleotide with phosphorothioate linkage
  modified_base 3: mod_base = OTHER; note = Internal Cy5 modified nucleotide with phosphorothioate linkage
ttttttttttttttttttttttt

SEQ ID NO: 1460 - DNA, 20 bp, synthetic construct
  misc_feature 1..20: note = Description of Artificial Sequence: Synthetic oligonucleotide
  source 1..20: mol_type = other DNA
tttttttttttttttttttt

SEQ ID NO: 1461 - DNA, 22 bp, synthetic construct
  misc_feature 1..22: note = Description of Artificial Sequence: Synthetic oligonucleotide
  source 1..22: mol_type = other DNA
  modified_base 20: mod_base = OTHER; note = Nucleotide with phosphorothioate linkage
  modified_base 21: mod_base = OTHER; note = Internal Biotin modified nucleotide with phosphorothioate linkage
tttttttttttttttttttttt

SEQ ID NO: 1462 - DNA, 21 bp, synthetic construct
  misc_feature 1..21: note = Description of Artificial Sequence: Synthetic oligonucleotide
  source 1..21: mol_type = other DNA
  modified_base 1: mod_base = OTHER; note = Internal Biotin modified nucleotide
ttttttttttttttttttttt

SEQ ID NO: 1463 - DNA, 23 bp, synthetic construct
  misc_feature 1..23: note = Description of Artificial Sequence: Synthetic oligonucleotide
  source 1..23: mol_type = other DNA
  modified_base 3: mod_base = OTHER; note = Internal 6-Carboxyfluorescein modified nucleotide
  misc_feature 1..12: note = DNA
  misc_feature 13..17: note = RNA
  misc_feature 18..23: note = DNA
ttttttttttttttttttttttt

SEQ ID NO: 1464 - DNA, 13 bp, synthetic construct
  misc_feature 1..13: note = Description of Artificial Sequence: Synthetic oligonucleotide
  source 1..13: mol_type = other DNA
ttttttttttttt

SEQ ID NO: 1465 - DNA, 13 bp, synthetic construct
  misc_feature 1..13: note = Description of Artificial Sequence: Synthetic oligonucleotide
  source 1..13: mol_type = other DNA
ttttttttttttt

SEQ ID NO: 1466 - DNA, 13 bp, synthetic construct
  misc_feature 1..13: note = Description of Artificial Sequence: Synthetic oligonucleotide
  source 1..13: mol_type = other DNA
ttttttttttttt

SEQ ID NO: 1467 - DNA, 20 bp, synthetic construct
  misc_feature 1..20: note = Description of Artificial Sequence: Synthetic oligonucleotide
  source 1..20: mol_type = other DNA
tttttttttttttttttttt

SEQ ID NO: 1468 - DNA, 20 bp, synthetic construct
  misc_feature 1..20: note = Description of Artificial Sequence: Synthetic oligonucleotide
  source 1..20: mol_type = other DNA
tttttttttttttttttttt

SEQ ID NO: 1469 - DNA, 19 bp, synthetic construct
  misc_feature 1..19: note = Description of Artificial Sequence: Synthetic oligonucleotide
  source 1..19: mol_type = other DNA
ttttttttttttttttttt

SEQ ID NO: 1470 - DNA, 19 bp, synthetic construct
  misc_feature 1..19: note = Description of Artificial Sequence: Synthetic oligonucleotide
  source 1..19: mol_type = other DNA
ttttttttttttttttttt

SEQ ID NO: 1471 - RNA, 41 nt, synthetic construct; identical to SEQ ID NO: 1439
  misc_feature 1..41: note = Description of Artificial Sequence: Synthetic oligonucleotide
  source 1..41: mol_type = other RNA

SEQ ID NO: 1472 - RNA, 41 nt, synthetic construct; identical to SEQ ID NO: 1439
  misc_feature 1..41: note = Description of Artificial Sequence: Synthetic oligonucleotide
  source 1..41: mol_type = other RNA

SEQ ID NO: 1473 - DNA, 42 bp, synthetic construct
  misc_feature 1..42: note = Description of Artificial Sequence: Synthetic oligonucleotide
  source 1..42: mol_type = other DNA
  modified_base 1: mod_base = OTHER; note = 5' Amino Modifier C6 modified nucleotide
  misc_feature 1: note = DNA
  misc_feature 2..42: note = RNA
ttaatttctactaagtgtagatcccccagcgcttcagcgttc

SEQ ID NO: 1474 - DNA, 42 bp, synthetic construct
  misc_feature 1..42: note = Description of Artificial Sequence: Synthetic oligonucleotide
  source 1..42: mol_type = other DNA
  modified_base 42: mod_base = OTHER; note = 3' Amino Modifier C6 modified nucleotide
  misc_feature 1..41: note = RNA
  misc_feature 42: note = DNA
taatttctactaagtgtagatcccccagcgcttcagcgttct

SEQ ID NO: 1475 - RNA, 41 nt, synthetic construct
  misc_feature 1..41: note = Description of Artificial Sequence: Synthetic oligonucleotide
  source 1..41: mol_type = other RNA
taatttctactaagtgtagatttacatggctctggtccgag

SEQ ID NO: 1476 - RNA, 41 nt, synthetic construct
  misc_feature 1..41: note = Description of Artificial Sequence: Synthetic oligonucleotide
  source 1..41: mol_type = other RNA
taatttctactaagtgtagatgccgataatgatgtagggat

SEQ ID NO: 1477 - RNA, 41 nt, synthetic construct; identical to SEQ ID NO: 1439
  misc_feature 1..41: note = Description of Artificial Sequence: Synthetic oligonucleotide
  source 1..41: mol_type = other RNA

SEQ ID NO: 1478 - DNA, 23 bp, synthetic construct
  misc_feature 1..23: note = Description of Artificial Sequence: Synthetic oligonucleotide
  source 1..23: mol_type = other DNA
  modified_base 1: mod_base = OTHER; note = Nucleotide with phosphorothioate linkage
  modified_base 2: mod_base = OTHER; note = Nucleotide with phosphorothioate linkage
  modified_base 3: mod_base = OTHER; note = Internal 6-Carboxyfluorescein modified nucleotide with phosphorothioate linkage
ttttttttttttttttttttttt

SEQ ID NO: 1479 - RNA, 41 nt, synthetic construct; identical to SEQ ID NO: 1476
  misc_feature 1..41: note = Description of Artificial Sequence: Synthetic oligonucleotide
  source 1..41: mol_type = other RNA

SEQ ID NO: 1480 - RNA, 41 nt, synthetic construct; identical to SEQ ID NO: 1475
  misc_feature 1..41: note = Description of Artificial Sequence: Synthetic oligonucleotide
  source 1..41: mol_type = other RNA

SEQ ID NO: 1481 - RNA, 41 nt, synthetic construct
  misc_feature 1..41: note = Description of Artificial Sequence: Synthetic oligonucleotide
  source 1..41: mol_type = other RNA
taatttctactaagtgtagatctgccaattgcaggaatgat

SEQ ID NO: 1482 - DNA, 20 bp, synthetic construct
  misc_feature 1..20: note = Description of Artificial Sequence: Synthetic oligonucleotide
  source 1..20: mol_type = other DNA
tttttttttttttttttttt

SEQ ID NO: 1483 - RNA, 41 nt, synthetic construct; identical to SEQ ID NO: 1439
  misc_feature 1..41: note = Description of Artificial Sequence: Synthetic oligonucleotide
  source 1..41: mol_type = other RNA

SEQ ID NO: 1484 - RNA, 41 nt, synthetic construct; identical to SEQ ID NO: 1475
  misc_feature 1..41: note = Description of Artificial Sequence: Synthetic oligonucleotide
  source 1..41: mol_type = other RNA

SEQ ID NO: 1485 - RNA, 41 nt, synthetic construct; identical to SEQ ID NO: 1476
  misc_feature 1..41: note = Description of Artificial Sequence: Synthetic oligonucleotide
  source 1..41: mol_type = other RNA

SEQ ID NO: 1486 - DNA, 41 bp, synthetic construct
  misc_feature 1..41: note = Description of Artificial Sequence: Synthetic oligonucleotide
  source 1..41: mol_type = other DNA
  misc_feature 1: note = DNA
  misc_feature 2..41: note = RNA
taatttctactaagtgtagatgccgataatgatgtagggat

SEQ ID NO: 1487 - DNA, 74 bp, synthetic construct
  misc_feature 1..74: note = Description of Artificial Sequence: Synthetic oligonucleotide
  source 1..74: mol_type = other DNA
aacccaaaagcatcactattatctttgactcaatttcctcacttctctagtgtagtattgggcaatgctgctgg

SEQ ID NO: 1488 - DNA, 16 bp, synthetic construct
  misc_feature 1..16: note = Description of Artificial Sequence: Synthetic oligonucleotide
  source 1..16: mol_type = other DNA
ccaatactacactaga

SEQ ID NO: 1489 - DNA, 16 bp, synthetic construct
  misc_feature 1..16: note = Description of Artificial Sequence: Synthetic oligonucleotide
  source 1..16: mol_type = other DNA
caatactacactagag

SEQ ID NO: 1490 - DNA, 13 bp, synthetic construct
  misc_feature 1..13: note = Description of Artificial Sequence: Synthetic oligonucleotide
  source 1..13: mol_type = other DNA
ttttttttttttt

SEQ ID NO: 1491 - DNA, 19 bp, synthetic construct
  misc_feature 1..19: note = Description of Artificial Sequence: Synthetic oligonucleotide
  source 1..19: mol_type = other DNA
ttttttttttttttttttt

SEQ ID NO: 1492 - DNA, 23 bp, synthetic construct
  misc_feature 1..23: note = Description of Artificial Sequence: Synthetic oligonucleotide
  source 1..23: mol_type = other DNA
  modified_base 1: mod_base = OTHER; note = Nucleotide with phosphorothioate linkage
  modified_base 2: mod_base = OTHER; note = Nucleotide with phosphorothioate linkage
  modified_base 3: mod_base = OTHER; note = Internal Fluorescein modified nucleotide with phosphorothioate linkage
ttttttttttttttttttttttt

SEQ ID NO: 1493 - RNA, 140 nt, synthetic construct
  misc_feature 1..140: note = Description of Artificial Sequence: Synthetic polynucleotide
  source 1..140: mol_type = other RNA
cttcactgataaagtggagaaccgcttcaccaaaagctgtcccttaggggattagaacttgagtgaaggtgggctgcttgcatcagcctaatgtcgagaagtgctttcttcggaaagtaaccctcgaaacaaattcattt

SEQ ID NO: 1494 - RNA, 57 nt, synthetic construct
  misc_feature 1..57: note = Description of Artificial Sequence: Synthetic oligonucleotide
  source 1..57: mol_type = other RNA
gttgcagaacccgaatagacgaatgaaggaatgcaaccccccagcgcttcagcgttc

SEQ ID NO: 1495 - RNA, 57 nt, synthetic construct
  misc_feature 1..57: note = Description of Artificial Sequence: Synthetic oligonucleotide
  source 1..57: mol_type = other RNA
gttgcagaacccgaatagacgaatgaaggaatgcaacgccgataatgatgtagggat

SEQ ID NO: 1496 - RNA, 57 nt, synthetic construct
  misc_feature 1..57: note = Description of Artificial Sequence: Synthetic oligonucleotide
  source 1..57: mol_type = other RNA
gttgcagaacccgaatagacgaatgaaggaatgcaactggcactgagaatttgacta

SEQ ID NO: 1497 - RNA, 57 nt, synthetic construct
  misc_feature 1..57: note = Description of Artificial Sequence: Synthetic oligonucleotide
  source 1..57: mol_type = other RNA
gttgcagaacccgaatagacgaatgaaggaatgcaactacaagtgcctgtaggtata

SEQ ID NO: 1498 - DNA, 20 bp, synthetic construct
  misc_feature 1..20: note = Description of Artificial Sequence: Synthetic oligonucleotide
  source 1..20: mol_type = other DNA
tttttttttttttttttttt

SEQ ID NO: 1499 - DNA, 29 bp, synthetic construct
  misc_feature 1..29: note = Description of Artificial Sequence: Synthetic oligonucleotide
  source 1..29: mol_type = other DNA
  misc_feature 1..12: note = DNA
  misc_feature 13..17: note = RNA
  misc_feature 18..29: note = DNA
ttttttttttttttttttttttttttttt

SEQ ID NO: 1500 - DNA, 20 bp, synthetic construct
  misc_feature 1..20: note = Description of Artificial Sequence: Synthetic oligonucleotide
  source 1..20: mol_type = other DNA
tttttttttttttttttttt

SEQ ID NO: 1501 - DNA, 20 bp, synthetic construct
  misc_feature 1..20: note = Description of Artificial Sequence: Synthetic oligonucleotide
  source 1..20: mol_type = other DNA
tttttttttttttttttttt

SEQ ID NO: 1502 - DNA, 20 bp, synthetic construct
  misc_feature 1..20: note = Description of Artificial Sequence: Synthetic oligonucleotide
  source 1..20: mol_type = other DNA
tttttttttttttttttttt

SEQ ID NO: 1503 - DNA, 32 bp, synthetic construct
  misc_feature 1..32: note = Description of Artificial Sequence: Synthetic oligonucleotide
  source 1..32: mol_type = other DNA
gactccacacggagtcttgctttcgtggtatt

SEQ ID NO: 1504 - DNA, 32 bp, synthetic construct
  misc_feature 1..32: note = Description of Artificial Sequence: Synthetic oligonucleotide
  source 1..32: mol_type = other DNA
gactccacacggagtcggatggctagtgtaac

SEQ ID NO: 1505 - DNA, 30 bp, synthetic construct
  misc_feature 1..30: note = Description of Artificial Sequence: Synthetic oligonucleotide
  source 1..30: mol_type = other DNA
agtgttacattatccaccatggcgagcttt

SEQ ID NO: 1506 - DNA, 30 bp, synthetic construct
  misc_feature 1..30: note = Description of Artificial Sequence: Synthetic oligonucleotide
  source 1..30: mol_type = other DNA
aaagctcgccatggtggataatgtaacact

SEQ ID NO: 1507 - RNA, 10 nt, synthetic construct
  misc_feature 1..10: note = Description of Artificial Sequence: Synthetic oligonucleotide
  source 1..10: mol_type = other RNA
aaattttttt

SEQ ID NO: 1508 - RNA, 10 nt, synthetic construct
  misc_feature 1..10: note = Description of Artificial Sequence: Synthetic oligonucleotide
  source 1..10: mol_type = other RNA
aaattttttt

SEQ ID NO: 1509 - RNA, 10 nt, synthetic construct
  misc_feature 1..10: note = Description of Artificial Sequence: Synthetic oligonucleotide
  source 1..10: mol_type = other RNA
aaattttttt

SEQ ID NO: 1510 - RNA, 10 nt, synthetic construct
  misc_feature 1..10: note = Description of Artificial Sequence: Synthetic oligonucleotide
  source 1..10: mol_type = other RNA
aaattttttt

SEQ ID NO: 1511 - DNA, 25 bp, synthetic construct
  misc_feature 1..25: note = Description of Artificial Sequence: Synthetic oligonucleotide
  source 1..25: mol_type = other DNA
  misc_feature 1..9: note = DNA
  misc_feature 10..14: note = RNA
  misc_feature 15..25: note = DNA
ttttttttttttttttttttttttt

SEQ ID NO: 1512 - DNA, 29 bp, synthetic construct
  misc_feature 1..29: note = Description of Artificial Sequence: Synthetic oligonucleotide
  source 1..29: mol_type = other DNA
  misc_feature 1..12: note = DNA
  misc_feature 13..17: note = RNA
  misc_feature 18..29: note = DNA
ttttttttttttttttttttttttttttt

SEQ ID NO: 1513 - DNA, 19 bp, synthetic construct
  misc_feature 1..19: note = Description of Artificial Sequence: Synthetic oligonucleotide
  source 1..19: mol_type = other DNA
ttttttttttttttttttt

SEQ ID NO: 1514 - DNA, 19 bp, synthetic construct
  misc_feature 1..19: note = Description of Artificial Sequence: Synthetic oligonucleotide
  source 1..19: mol_type = other DNA
ttttttttttttttttttt

SEQ ID NO: 1515 - DNA, 85 bp, synthetic construct
  misc_feature 1..85: note = Description of Artificial Sequence: Synthetic oligonucleotide
  source 1..85: mol_type = other DNA
  misc_feature 1..45: note = DNA
  misc_feature 46..85: note = RNA
tttttttttttttttttttttttttttttttttttttttttttttaatttctactaagtgtagatgccgataatgatgtagggat

SEQ ID NO: 1516 - DNA, 90 bp, synthetic construct
  misc_feature 1..90: note = Description of Artificial Sequence: Synthetic oligonucleotide
  source 1..90: mol_type = other DNA
  misc_feature 1..20: note = DNA
  misc_feature 21..24: note = RNA
  misc_feature 25..50: note = DNA
  misc_feature 51..90: note = RNA
ttttttttttttttttttttttttttttttttttttttttttttttttttaatttctactaagtgtagatgccgataatgatgtagggat

SEQ ID NO: 1517 - RNA, 50 nt, synthetic construct
  misc_feature 1..50: note = Description of Artificial Sequence: Synthetic oligonucleotide
  source 1..50: mol_type = other RNA
gccaccccaaaaatgaaggggactaaaacaagaagaattcagatttttaa

SEQ ID NO: 1518 - DNA, 22 bp, synthetic construct
  misc_feature 1..22: note = Description of Artificial Sequence: Synthetic oligonucleotide
  source 1..22: mol_type = other DNA
  modified_base 21: mod_base = OTHER; note = Internal Biotin modified nucleotide with phosphorothioate linkage
tttttttttttttttttttttt

SEQ ID NO: 1519 - DNA, 48 bp, synthetic construct
  misc_feature 1..48: note = Description of Artificial Sequence: Synthetic oligonucleotide
  source 1..48: mol_type = other DNA
tttcttgctttcgtggtattcttgctagttacactagccatccttact

SEQ ID NO: 1520 - DNA, 52 bp, synthetic construct
  misc_feature 1..52: note = Description of Artificial Sequence: Synthetic oligonucleotide
  source 1..52: mol_type = other DNA
  misc_feature 1..9: note = DNA
  misc_feature 10..14: note = RNA
  misc_feature 15..38: note = DNA
  misc_feature 39..43: note = RNA
  misc_feature 44..52: note = DNA
gctcagtattttttatactgaccgcctcacctctcttttttttaaacagagg

SEQ ID NO: 1521 - DNA, 20 bp, synthetic construct
  misc_feature 1..20: note = Description of Artificial Sequence: Synthetic oligonucleotide
  source 1..20: mol_type = other DNA
ttacaaacattggccgcaaa

SEQ ID NO: 1522 - DNA, 18 bp, synthetic construct
  misc_feature 1..18: note = Description of Artificial Sequence: Synthetic oligonucleotide
  source 1..18: mol_type = other DNA
gcgcgacattccgaagaa

SEQ ID NO: 1523 - RNA, 41 nt, synthetic construct; identical to SEQ ID NO: 1439
  misc_feature 1..41: note = Description of Artificial Sequence: Synthetic oligonucleotide
  source 1..41: mol_type = other RNA

SEQ ID NO: 1524 - DNA, 20 bp, synthetic construct
  misc_feature 1..20: note = Description of Artificial Sequence: Synthetic oligonucleotide
  source 1..20: mol_type = other DNA
cctccgtgatatggctcttc

SEQ ID NO: 1525 - DNA, 18 bp, synthetic construct
  misc_feature 1..18: note = Description of Artificial Sequence: Synthetic oligonucleotide
  source 1..18: mol_type = other DNA
agagtcctttgggcttcc

SEQ ID NO: 1526 - RNA, 41 nt, synthetic construct; identical to SEQ ID NO: 1475
  misc_feature 1..41: note = Description of Artificial Sequence: Synthetic oligonucleotide
  source 1..41: mol_type = other RNA

SEQ ID NO: 1527 - DNA, 25 bp, synthetic construct
  misc_feature 1..25: note = Description of Artificial Sequence: Synthetic oligonucleotide
  source 1..25: mol_type = other DNA
aggtgcctggaatattggtgaacag

SEQ ID NO: 1528 - DNA, 26 bp, synthetic construct
  misc_feature 1..26: note = Description of Artificial Sequence: Synthetic oligonucleotide
  source 1..26: mol_type = other DNA
tcaagagtgcgggagaaaattgatcg

SEQ ID NO: 1529 - RNA, 41 nt, synthetic construct
  misc_feature 1..41: note = Description of Artificial Sequence: Synthetic oligonucleotide
  source 1..41: mol_type = other RNA
taatttctactaagtgtagatcatcagaggctgctcgtgtt

SEQ ID NO: 1530 - DNA, 46 bp, synthetic construct
  misc_feature 1..46: note = Description of Artificial Sequence: Synthetic oligonucleotide
  source 1..46: mol_type = other DNA
ggtagccaaacaggaacaagtatggcctctcctcagattgctggcg

SEQ ID NO: 1531 - DNA, 42 bp, synthetic construct
  misc_feature 1..42: note = Description of Artificial Sequence: Synthetic oligonucleotide
  source 1..42: mol_type = other DNA
tcttgctttcgtggtattcttgctagttacactagccatcct

SEQ ID NO: 1532 - DNA, 51 bp, synthetic construct
  misc_feature 1..51: note = Description of Artificial Sequence: Synthetic oligonucleotide
  source 1..51: mol_type = other DNA
attgcacaatttgcccccagcgcttcagcgttcttcggaatgtcgcgcatt

SEQ ID NO: 1533 - DNA, 16 bp, synthetic construct
  misc_feature 1..16: note = Description of Artificial Sequence: Synthetic oligonucleotide
  source 1..16: mol_type = other DNA
cgtaatgtattgtccc

SEQ ID NO: 1534 - DNA, 16 bp, synthetic construct
  misc_feature 1..16: note = Description of Artificial Sequence: Synthetic oligonucleotide
  source 1..16: mol_type = other DNA
gcgtaatgtattgtcc

SEQ ID NO: 1535 - DNA, 16 bp, synthetic construct
  misc_feature 1..16: note = Description of Artificial Sequence: Synthetic oligonucleotide
  source 1..16: mol_type = other DNA
tgcgtaatgtattgtc

SEQ ID NO: 1536 - DNA, 16 bp, synthetic construct
  misc_feature 1..16: note = Description of Artificial Sequence: Synthetic oligonucleotide
  source 1..16: mol_type = other DNA
atgcgtaatgtattgt

SEQ ID NO: 1537 - DNA, 67 bp, synthetic construct
  misc_feature 1..67: note = Description of Artificial Sequence: Synthetic oligonucleotide
  source 1..67: mol_type = other DNA
taaaaagggatatgcgtaatgtattgtccctgagagtgttagtaaacggaacattcctcaaacaccc

SEQ ID NO: 1538 - DNA, 16 bp, synthetic construct
  misc_feature 1..16: note = Description of Artificial Sequence: Synthetic oligonucleotide
  source 1..16: mol_type = other DNA
tgttccgtttactaac

SEQ ID NO: 1539 - DNA, 16 bp, synthetic construct
  misc_feature 1..16: note = Description of Artificial Sequence: Synthetic oligonucleotide
  source 1..16: mol_type = other DNA
gttccgtttactaaca

SEQ ID NO: 1540 - DNA, 16 bp, synthetic construct
  misc_feature 1..16: note = Description of Artificial Sequence: Synthetic oligonucleotide
  source 1..16: mol_type = other DNA
ttccgtttactaacac

SEQ ID NO: 1541 - DNA, 16 bp, synthetic construct
  misc_feature 1..16: note = Description of Artificial Sequence: Synthetic oligonucleotide
  source 1..16: mol_type = other DNA
tccgtttactaacact

SEQ ID NO: 1542 - DNA, 16 bp, synthetic construct
  misc_feature 1..16: note = Description of Artificial Sequence: Synthetic oligonucleotide
  source 1..16: mol_type = other DNA
tatctttgactcaatt

SEQ ID NO: 1543 - DNA, 16 bp, synthetic construct
  misc_feature 1..16: note = Description of Artificial Sequence: Synthetic oligonucleotide
  source 1..16: mol_type = other DNA
ttatctttgactcaat

SEQ ID NO: 1544 - DNA, 16 bp, synthetic construct
  misc_feature 1..16: note = Description of Artificial Sequence: Synthetic oligonucleotide
  source 1..16: mol_type = other DNA
attatctttgactcaa

SEQ ID NO: 1545 - DNA, 16 bp, synthetic construct
  misc_feature 1..16: note = Description of Artificial Sequence: Synthetic oligonucleotide
  source 1..16: mol_type = other DNA
tattatctttgactca

SEQ ID NO: 1546 - DNA, 30 bp, synthetic construct; identical to SEQ ID NO: 1455
  misc_feature 1..30: note = Description of Artificial Sequence: Synthetic oligonucleotide
  source 1..30: mol_type = other DNA
